(19) United States
(12) Patent Application Publication
(10) Pub. No.: US 2015/0086581 A1
(43) Pub. Date: Mar. 26, 2015

(54) Fast Diagnosis and Personalized Treatment for Acne

(71) Applicant: The Regents of the University of California, Oakland, CA (US)

(72) Inventors: Huiying Li, Los Alamitos, CA (US); Shuta Tomida, Santa Monica, CA (US)

(21) Appl. No.: 14/385,576

(22) PCT Filed: Mar. 15, 2013
(86) PCT No.: PCT/US13/32551

§ 371 Date: Sep. 16, 2014

Related U.S. Application Data
(60) Provisional application No. 61/612,290, filed on Mar. 17, 2012.

(51) Int. Cl. C12Q 1/68; C12N 7/00; A61K 35/74; A61K 35/76; C12Q 1/70; A61K 39/02

(52) U.S. Cl. CPC C12Q 1/689; C12Q 1/701; A61K 39/0208; A61K 35/741; A61K 35/76; C12N 7/00; C12Q 2600/156; C12Q 2600/16; C12Q 2600/112; C12N 2795/00032
USPC 424/190.1; 435/6.12; 506/2; 435/5; 506/9; 435/6.11; 424/234.1; 424/93.4; 424/93.6

(57) ABSTRACT

Methods of diagnosing and treating patients afflicted with acne, including diagnosing one as having acne if the individual possesses RT4, RT5, RT7, RT8, RT9, or RT10. Methods for treating acne include administering an effective amount of a drug specifically targeting RT4, RT5, RT7, RT8, RT9, or RT10, such as small molecules, antisense molecules, siRNAs, biologics, antibodies, phages, vaccines, or combination thereof.

### CROSS-REFERENCE TO RELATED APPLICATIONS

[0001] This application claims priority to U.S. Provisional Patent Application No. 61/612,290, filed on Mar. 17, 2012, which is incorporated by reference herein in its entirety for all purposes.

### STATEMENT REGARDING FEDERALLY SPONSORED RESEARCH

[0002] This invention was made with Government support of Grant Nos. UH2AR057503 and R01GM099530, awarded by the National Institutes of Health. The Government has certain rights in this invention.

### BACKGROUND OF THE INVENTION

[0003] Acne is a skin condition that causes pimples or “zits.” This includes whiteheads, blackheads, and red, inflamed patches of skin (such as cysts). Acne occurs when tiny pores on the surface of the skin become clogged. Each pore opens to a follicle. A follicle contains a hair and an oil gland. The oil released by the gland helps remove old skin cells and keeps your skin soft. When glands produce too much oil, the pores can become blocked. Dirt, bacteria, and cells build up. The blockage is called a plug or comedone. If the top of the plug is white, it is called a whitehead. If the top of the plug is dark, it is called a blackhead. If the plug breaks open, swelling and red bumps occur. Acne that is deep in your skin can cause hard, painful cysts. This is called cystic acne.

[0004] Acne is most common in teenagers, but anyone can get acne. 85% of teenagers have acne. Hormonal changes may cause the skin to be more oily. Acne tends to run in families. It may be triggered by hormonal changes related to puberty, menstrual periods, pregnancy, birth control pills, or stress; greasy or oily cosmetic and hair products; certain drugs (such as steroids, testosterone, estrogen, and phenyloin); or high levels of humidity and sweating.

[0005] Various treatments exist for the treatment of acne. In general, acne treatments work by reducing oil production, speeding up skin cell turnover, fighting bacterial infection, reducing the inflammation or doing all four. These types of acne treatments include over-the-counter topical treatments, antibiotics, oral contraceptives and cosmetic procedures. Acne lotions may dry up the oil, kill bacteria and promote sloughing of dead skin cells. Over-the-counter (OTC) lotions are generally mild and contain benzoyl peroxide, sulfur, resorcinol, salicylic acid or sulfur as their active ingredient. Studies have found that using topical benzoyl peroxide along with oral antibiotics may reduce the risk of developing antibiotic resistance. Antibiotics may cause side effects, such as an upset stomach, dizziness or skin discoloration. These drugs also increase your skin's sun sensitivity and may reduce the effectiveness of oral contraceptives. For deep cysts, antibiotics may not be enough. Isotretinoin (Amnesteem, Claravis, Sotret) is a powerful medication available for scarring cystic acne or acne that doesn't respond to other treatments. However, isotretinoin has many side effects, such as dry skin, depression, severe stomach pain, and muscle/joint/back pain, and can cause birth defects in babies whose mothers use isotretinoin. Oral contraceptives, including a combination of norgestimate and ethinyl estradiol (Ortho Tri-Cyclen, Previfem, others), can improve acne in women. However, oral contraceptives may cause other side effects, such as headaches, breast tenderness, nausea, and depression. Chemical peels and microdermabrasion may be helpful in controlling acne. These cosmetic procedures, which have traditionally been used to lessen the appearance of fine lines, sun damage, and minor facial scars, are most effective when used in combination with other acne treatments. They may cause temporary, severe redness, scaling and blistering, and long-term discoloration of the skin.

[0006] In addition to the negative side-effects caused by the currently available treatments, there is no treatment available that is personalized to patients to target specific bacteria causing acne on an individual level. Additionally, it will be useful for dermatologists to know which strains are dominant on the skin of a patient at the time of diagnosis in order to personalize acne treatments. Thus, there exists a need in the art for methods of personalized diagnoses and treatment of acne.

### BRIEF SUMMARY OF THE INVENTION

[0007] The present invention is directed to methods of diagnosis and personalized treatment in patients afflicted with acne.

[0008] In one embodiment, the invention provides a method for determining whether an individual possesses acne comprising: obtaining a skin sample from an individual; isolating bacterial DNA from said sample; amplifying 16S ribosomal DNA in said sample; sequencing said amplified DNA products; and typing the individual's DNA based on one or more of the ten major ribotypes (RTs) of P. acnes strains, RT1-RT10 (SEQ ID NOs 1-10), wherein said typing occurs by determining whether said individual possesses one or more of RT1-RT10 and wherein said individual is diagnosed as having acne if said individual possesses RT4, RT5, RT7, RT8, RT9, or RT10. For example, said individual may be diagnosed as having acne if said individual possesses RT4 (SEQ ID NO:4), RT5 (SEQ ID NO:5), or RT8 (SEQ ID NO:8).

[0009] In another embodiment, the invention provides a method for diagnosing different types of acne comprising: obtaining a skin sample from a subject; isolating bacterial DNA from said sample; amplifying 16S ribosomal DNA in said sample; sequencing said amplified DNA products; and typing the subject's DNA based on one or more of the five major microbiome types of P. acnes strains, wherein said subject is diagnosed as having acne if said subject is typed to microbiome IV or V.

[0010] In yet another embodiment, the invention provides a method for rapidly diagnosing acne comprising: obtaining a skin sample from a subject; isolating bacterial DNA from said sample; using one or more primer sets to amplify said DNA; and analyzing said amplified DNA for the presence of a sequence having at least 95% homology with at least one of SEQ ID NOs 29-32 and 82-434, wherein said subject is diagnosed as having acne if the presence of a sequence having at least 95% homology with at least one of SEQ ID NOs 29-32 and 82-434 exists. For example, said amplified DNA may be analyzed for the presence of a sequence having at least 99% homology with at least one of SEQ ID NOs 29-32 and 82-434 and wherein said subject is diagnosed as having acne if the presence of a sequence having at least 99% homology with at least one of SEQ ID NOs 29-32 and 82-434 exists. As another example, said amplified DNA may be analyzed for the presence of at least one of SEQ ID NOs 29-32 and 82-434 and wherein said subject is diagnosed as having acne if the presence of at least one of SEQ ID NOs 29-32 and 82-434 exists.

[0011] In another embodiment, the invention provides a method for rapidly diagnosing acne comprising: obtaining a skin sample from a subject; isolating bacterial DNA from said sample; using one or more primer sets to amplify said DNA; using one or more probes to detect said amplified DNA; and analyzing said probe signals for the presence of Locus 1 (at least one sequence having at least 95% homology to at least one of SEQ ID NOs 29 and 82-97), Locus 2 (at least one sequence having at least 95% homology to at least one of SEQ ID NOs 30 and 98-186), Locus 3 (at least one sequence having at least 95% homology to at least one of SEQ ID NOs 31 and 187-423), and/or Locus 4 (at least one sequence having at least 95% homology to at least one of SEQ ID NOs 32 and 424-434), wherein said subject is diagnosed as having acne if one or more of Loci 1-4 are present. For example, the signals may be analyzed for the presence of Locus 1, Locus 2, Locus 3, and/or Locus 4 based upon at least 99% homology or 100% homology.

[0012] In the foregoing methods, a primer of said primer sets may be selected from the group consisting of SEQ ID NOs 11, 12, 17, and 18 (for Locus 1), SEQ ID NOs 13, 14, 20, and 21 (for Locus 2), SEQ ID NOs 15, 16, 23, and 24 (for Locus 3), and SEQ ID NOs 26 and 27 (for Locus 4). In the foregoing methods, said probes may be SEQ ID NO:19 (for Locus 1), SEQ ID NO:22 (for Locus 2), SEQ ID NO:25 (for Locus 3), and SEQ ID NO:28 (for Locus 4).

[0013] In yet another embodiment, the invention provides a vaccine for the prevention and/or treatment of acne caused by P. acnes comprising a heat inactivated P. acnes strain, an attenuated protein of said strain, or combination thereof, wherein said strain is an RT4 strain, an RT5 strain, an RT7 strain, an RT8 strain, an RT9 strain, or an RT10 strain.

[0014] In yet another embodiment, the invention provides a vaccine for the prevention and/or treatment of acne caused by P. acnes comprising a heat inactivated P. acnes strain, an attenuated protein of said strain, or combination thereof identified to be specific to a subject based on 16S rDNA sequence analysis of the strains of P. acnes affecting said subject.

[0015] With regard to the vaccines, said heat inactivated P. acnes strain, attenuated protein, or combination thereof may be specific for at least one of unique genomic loci, regions, or sequences identified for the strains of P. acnes. Said heat inactivated P. acnes strain, attenuated protein, or combination thereof may be specific for at least one of Locus 1 (SEQ ID NOs 29 and 82-97), Locus 2 (SEQ ID NOs 30 and 98-186), Locus 3 (31 and 187-423), and Locus 4 (32 and 424-434).

[0016] In yet another embodiment, the invention provides a method for the personalized treatment of acne comprising determining the strains of P. acnes affecting a subject and treating said subject with an active ingredient directed to at least one detected strain of P. acnes, wherein the active ingredient comprises a drug targeting specific strains of P. acnes, wherein the targeting drug comprises small molecules, antisense molecules, siRNA, biologics, antibodies, and combinations thereof targeting genomic elements specific for strains of P. acnes associated with acne.

[0017] In yet another embodiment, the invention provides a method for treating acne comprising: administering an effective amount of a probiotic that comprises at least one strain of P. acnes that is associated with healthy or normal skin based on its 16S rDNA. Said strain may be an RT6 strain. Said strain may have at least 95% homology to SEQ ID NO:51 SEQ ID NO:52, SEQ ID NO:53, or SEQ ID NO:54, such as at least 99% homology or 100% homology.

[0018] In yet another embodiment, the invention provides a method for treating acne comprising: administering an effective amount of a metabolite produced by a strain of P. acnes that is associated with healthy or normal skin, wherein said metabolite is selected from the group comprising bacterial culture supernatant, cell lysate, proteins, nucleic acids, lipids, and other bacterial molecules. Said strain may be an RT6 strain. Said strain may have at least 95% homology to SEQ ID NO:51, SEQ ID NO:52, SEQ ID NO:53, or SEQ ID NO:54, such as at least 99% homology or 100% homology.

[0019] In yet another embodiment, the invention provides a method for treating acne in a subject comprising: administering an effective amount of a drug specifically targeting RT4, RT5, RT7, RT8, RT9, or RT10, when said subject is determined to possess RT4, RT5, RT7, RT8, RT9, or RT10, respectively. The earlier-described methods may be performed prior to administration of said drug. Said drug may be a small molecule, antisense molecule, siRNA, biologic, antibody, or combination thereof.

[0020] In yet another embodiment, the invention provides a composition comprising at least one strain of P. acnes that is associated with healthy or normal skin. Said strain may be an RT6 strain. Said strain may have at least 95% homology to SEQ ID NO:51, SEQ ID NO:52, SEQ ID NO:53, or SEQ ID NO:54, such as at least 99% homology or 100% homology.

[0021] In yet another embodiment, the invention provides a method for diagnosing IB-3-based acne comprising: obtaining a skin sample from a subject; isolating bacterial DNA from said sample; using one or more primer sets to amplify said DNA; and analyzing said amplified DNA for the presence of a sequence having at least 95% homology with at least one of SEQ ID NOs 55-81, wherein said subject is diagnosed as having IB-3-based acne if the presence of a sequence having at least 95% homology with at least one of SEQ ID NOs 55-81 exists.

[0022] In yet another embodiment, the invention provides a method for the personalized treatment of acne comprising determining the strain(s) of acne affecting a subject and administering to said subject an effective amount of at least one phage specifically directed to said strain(s). For example, the subject may be treated with phage directed against an RT4 strain, an RT5 strain, an RT7 strain, and RT8 strain, an RT9 strain, and/or an RT10 strain.

[0023] In yet another embodiment, the invention provides a method for treating an individual suffering from acne of microbiome type I comprising administering to said individual an effective amount of a phage, wherein said phage is selected from the group consisting of: PHL113M01 (SEQ ID NO:36), PHL111M01 (SEQ ID NO:33), PHL082M00 (SEQ ID NO:47), PHL060L00 (SEQ ID NO:34), PHL067M10 (SEQ ID NO:42), PHL071N05 (SEQ ID NO:41), PHL112N00 (SEQ ID NO:35), PHL037M02 (SEQ ID NO:40), PHL085N00 (SEQ ID NO:46), PHL115M02 (SEQ ID NO:43), PHL085M01 (SEQ ID NO:44), PHL114L00 (SEQ ID NO:37), PHL010M04 (SEQ ID NO:38), and PHL066M04 (SEQ ID NO:39).

[0024] In yet another embodiment, the invention provides a method for treating an individual suffering from acne of microbiome type I with IB-3 strain comprising administering to said individual an effective amount of a phage, wherein said phage is selected from the group consisting of: PHL082M00 (SEQ ID NO:47) and PHL071N05 (SEQ ID NO:41).

[0025] In yet another embodiment, the invention provides a method for treating an individual suffering from acne of microbiome type II comprising administering to said individual an effective amount of a phage, wherein said phage is selected from the group consisting of: PHL113M01 (SEQ ID NO:36), PHL060L00 (SEQ ID NO:34), PHL112N00 (SEQ ID NO:35), and PHL085M01 (SEQ ID NO:44).

[0026] In yet another embodiment, the invention provides a method for treating an individual suffering from acne of microbiome type III or dominant RT8 comprising administering to said individual an effective amount of a phage, wherein said phage is selected from the group consisting of: PHL113M01 (SEQ ID NO:36), PHL111M01 (SEQ ID NO:33), PHL082M00 (SEQ ID NO:47), PHL060L00 (SEQ ID NO:34), PHL067M10 (SEQ ID NO:42), PHL071N05 (SEQ ID NO:41), PHL112N00 (SEQ ID NO:35), PHL037M02 (SEQ ID NO:45), PHL085N00 (SEQ ID NO:46), PHL115M02 (SEQ ID NO:43), PHL085M01 (SEQ ID NO:44), PHL114L00 (SEQ ID NO:37), PHL073M02 (SEQ ID NO:40), PHL010M04 (SEQ ID NO:38), and PHL066M04 (SEQ ID NO:39).

[0027] In yet another embodiment, the invention provides a method for treating an individual suffering from acne of microbiome type IV comprising administering to said individual an effective amount of a phage, wherein said phage is selected from the group consisting of: PHL113M01 (SEQ ID NO:36), PHL111M01 (SEQ ID NO:33), PHL082M00 (SEQ ID NO:47), PHL060L00 (SEQ ID NO:34), PHL067M10 (SEQ ID NO:42), PHL071N05 (SEQ ID NO:41), PHL112N00 (SEQ ID NO:35), PHL037M02 (SEQ ID NO:45), PHL085N00 (SEQ ID NO:46), PHL115M02 (SEQ ID NO:43), PHL085M01 (SEQ ID NO:44), PHL114L00 (SEQ ID NO:37), PHL073M02 (SEQ ID NO:40), PHL010M04 (SEQ ID NO:38), and PHL066M04 (SEQ ID NO:39).

[0028] In yet another embodiment, the invention provides a method for treating an individual suffering from acne of microbiome type V comprising administering to said individual an effective amount of a phage, wherein said phage is selected from the group consisting of: PHL113M01 (SEQ ID NO:36), PHL111M01 (SEQ ID NO:33), PHL082M00 (SEQ ID NO:47), PHL060L00 (SEQ ID NO:34), PHL067M10 (SEQ ID NO:42), PHL071N05 (SEQ ID NO:41), PHL112N00 (SEQ ID NO:35), PHL037M02 (SEQ ID NO:45), PHL085N00 (SEQ ID NO:46), PHL115M02 (SEQ ID NO:43), PHL085M01 (SEQ ID NO:44), PHL114L00 (SEQ ID NO:37), PHL073M02 (SEQ ID NO:40), PHL010M04 (SEQ ID NO:38), and PHL066M04 (SEQ ID NO:39).

[0029] In yet another embodiment, the invention provides a method for treating a Propionibacterium humerusii-associated malady comprising administering to said individual an effective amount of a phage, wherein said phage is selected from the group consisting of: PHL113M01 (SEQ ID NO:36), PHL111M01 (SEQ ID NO:33), PHL082M00 (SEQ ID NO:47), PHL067M10 (SEQ ID NO:42), PHL071N05 (SEQ ID NO:41), PHL085N00 (SEQ ID NO:46), PHL085M01 (SEQ ID NO:44), PHL114L00 (SEQ ID NO:37), PHL073M02 (SEQ ID NO:40), and PHL010M04 (SEQ ID NO:38).

[0030] In yet another embodiment, the invention provides a kit for diagnosing acne in a subject, wherein said kit comprises: at least one primer selected from the group comprising SEQ ID NOs 11-18, 20, 21, 23, 24, 26, and 27; and instructions for use.

[0031] In yet another embodiment, the invention provides a kit for diagnosing acne in a subject, wherein said kit comprises: at least one primer selected from the group comprising SEQ ID NOs 11-18, 20, 21, 23, 24, 26, and 27; at least one probe selected from the group comprising SEQ ID NOs 19, 22, 25, and 28; and instructions for use.

### BRIEF DESCRIPTION OF THE FIGURES

[0032] This application file contains at least one drawing executed in color. Copies of this application with color drawing(s) will be provided by the Office upon request and payment of the necessary fee.

[0033] FIG. 1 shows that P. acnes dominates the microbiota of pilosebaceous units, accounting for 87% of the clones. P. acnes was dominant in pilosebaceous units in both acne patients and individuals with normal skin. By 16S rDNA sequencing, P. acnes sequences accounted for 87% of all the clones. Species with a relative abundance greater than 0.35% are listed in order of relative abundance. Species distribution from a metagenomic shotgun sequencing of pooled samples from normal individuals confirmed the high abundance of P. acnes in pilosebaceous units, as shown on the far right column.

[0034] FIG. 2 shows that the rank abundance of P. acnes ribotypes shows a distribution similar to that seen at the higher taxonomic levels. A few highly-abundant ribotypes and a large number of rare ribotypes were observed in the samples. Some ribotypes were highly enriched in acne patients. Only the top 30 most abundant ribotypes are reflected in FIG. 2.

[0035] FIG. 3 shows that the most abundant P. acnes ribotypes in pilosebaceous units were also abundant at other body sites. The major ribotypes found in acne patients and normal individuals were compared to the datasets from the HMP and Grice et al. (2009). The top three ribotypes are the most abundant ones in different datasets. The excess RT4 and RT5 seen in the dataset by Grice et al. (2009) was due to one subject, HV4, whose P. acnes strain population was dominated by these two ribotypes at every skin site sampled. After removal of this subject, the ribotype distribution is similar to the HMP samples and the normal skin samples studied. RT6 is also found abundant in the HMP dataset, which were collected from healthy individuals.

[0036] FIG. 4 shows that P. acnes population structures differ in acne and normal skin. P. acnes populations from samples were clustered using principal coordinates analysis of the weighted UniFrac distance matrix for the top ten most abundant ribotypes. The principal coordinate 1 (P1) explains 43.64% of the variation and P2 explains 20.07% of the variation. The analysis was performed using QIIME (Caporaso et al. 2010).

[0037] FIG. 5 shows the distribution of the top ten most abundant P. acnes ribotypes in acne patients and individuals with normal skin. Each column represents the percentage of the top ten ribotypes identified in each subject. The average P. acnes clone number per subject was 262 and the average clone number of top ten ribotypes was 100. Five major microbiome types at the P. acnes strain level were observed in the data. Types IV and V were mostly found in acne patients. Two samples (one from acne, one from normal skin) with fewer than 50 P. acnes 16S rDNA sequences are not displayed.

[0038] FIG. 6 shows the distribution of the top ten most abundant P. acnes ribotypes in all samples without separating the two groups of acne and normal skin. Each column represents the percentage of the top ten ribotypes identified in each sample. When all samples were clustered, the same five major microbiome types at the P. acnes strain level were observed, indicating that microbiome classification does not depend on the states of the disease. Only three out of 99 samples were clustered differently compared to the one shown in FIG. 5 (marked with asterisks). Two samples, one from acne and one from normal skin, with fewer than 50 P. acnes 16S rDNA sequences are not shown.

[0039] FIG. 7 shows that the same five major microbiome types were observed in multiple datasets. Samples from the study, HMP, and Grice at al. (2009) were clustered together based on the top ten most abundant P. acnes ribotypes. In total, 284 samples were included. Each column represents the percentage of the top ten ribotypes identified in each sample. Both HMP samples and samples from Grice et al. (2009) were collected from healthy individuals, therefore the percentage of microbiome types IV and V are under-represented in the analysis. Samples with fewer than ten sequences of the top ten ribotypes were not included.

[0040] FIG. 8 indicates that the genome comparison of 71 P. acnes strains showed that the genomes of RT4 and RT5 are distinct from others. Two chromosomal regions, loci 1 and 2, are unique to clade IA-2 and one other genome HL086PA1. clade IA-2 consists of mainly RT4 and RT5 that were highly enriched in acne. The presence of a plasmid (locus 3) is also characteristic of RT4 and RT5. Each row represents a P. acnes genome colored according to the ribotypes. Rows are ordered by the phylogeny calculated based on the SNPs in the P. acnes core genome. Only the topology is shown. The clades were named based on their recA types (IA, IB and II). Columns represent predicted open reading frames (ORFs) in the genomes and are ordered by ORF positions along the finished genome HL096PA1, which encodes a 55 Kb plasmid. Only the first 300 ORFs on the chromosome (on the left) and all the ORFs on the plasmid (on the right) are shown. The colored plasmid regions represent genes on contigs that match exclusively to the HL096PA1 plasmid region. The genes that fall on contigs that clearly extend beyond the plasmid region are likely to be chromosomally located and are colored in grey. Acne index for the ribotypes was calculated based on the percentage of clones of each ribotype found in acne as shown in column 5 in Table 1.

[0041] FIG. 9 shows the phylogentic tree constructed based on the 96,887 SNPs in P. acnes core genome, which shows that the 71 genomes cluster into distinct clades, consistent with recA types that have been used to classify P. acnes strains. The 16S ribotypes of the genomes represent the relationship of the lineages to a large extent. At one end of the tree, clades IA-2 and IB-1 mainly consist of the ribotypes enriched in acne, and at the other end of the tree, RT6 in clade II was mainly found in healthy subjects. Bootstrap test with 1,000 replicates were performed. The distances between the branches were calculated based on the SNPs in the core genome and do not represent the non-core regions of each genome. The enlarged branches were colored according to the 16S ribotypes as shown in FIG. 8.

[0042] FIG. 10 provides a genome comparison of 71 P. acnes strains and shows that the genomes of RT4 and RT5 are distinct from others. All of the predicted open reading frames (ORFs) encoded on the chromosome are shown. Each row represents a P. acnes genome colored according to the ribotypes. Rows are ordered by the phylogeny calculated based on the SNPs in P. acnes core genome. Only the topology is shown. Columns represent ORFs in the genomes and are ordered by their positions along the finished genome HL096PA1. Loci 1 and 2, which are unique to mainly RT4 and RT5 strains, and locus 4, which is unique to mainly RT8 strains, can be seen in the figure.

[0043] FIG. 11 provides a sequence coverage comparison between the chromosome and the plasmid region in all genomes harboring a putative plasmid, which shows that the copy number of plasmid ranges from 1 to 3 per genome. The X-axis represents the DNA sequences along the chromosome based on the coordinates of the finished genome HL096PA1, followed by plasmid sequences. The Y-axis represents the sequence coverage. The genomes were in the same order as in FIG. 8, except HL056PA1 (as a negative control).

[0044] FIG. 12 reflects that quantitative PCR (qPCR) confirmed that the copy number of plasmid in each genome is 1-3 as predicted from sequence coverage comparison. Pak and RecA are housekeeping genes located on the chromosome and TadA is a conserved gene in the Tad locus located on the plasmid. The copy number ratio between TadA and Pak ranges from 1 to 3 in genomes, while the ratio between RecA and Pak is 1 in all the genomes. The TadA gene in HL078PA1 and HL045PA1 had amplification in late cycles in qPCR. Conventional PCR confirmed the amplification of TadA in these two strains, while other strains without the plasmid showed no amplification (data not shown).

[0045] FIG. 13 shows a power law regression for new genes (n) discovered with the addition of new genome sequences (N). Circles are the medians of n for 200 simulations. Error bars indicate the standard deviations for the 200 simulations.

[0046] FIG. 14 shows a power law regression for total genes (n) accumulated with the addition of new genome sequences (N). Circles are the medians of n for 200 simulations. Error bars indicate the standard deviations for the 200 simulations.

[0047] FIG. 15 shows the proportion of the 123,223 SNPs in the core regions specific to recA types I, II and III.

[0048] FIG. 16 shows the phylogenetic tree of 82 P. acnes strains constructed based on the 123,223 SNPs in the core regions (2.20 Mb). The distances between strains were calculated as nucleotide substitution rates at all SNP sites, colored according to the scale bar. The strains from the same individuals (SSIs) belonging to the same lineages were marked with “+”.

[0049] FIG. 17 shows the pan-genomes of types IA (A), IB (B) and II (C) strains. Circles are the medians of n for 200 simulations. Error bars are standard deviations for the 200 simulations.

[0050] FIG. 18 shows the SNP distribution in core regions. FIG. 18a shows SNP frequencies (percentage of polymorphic sites) of the genes in the core regions. FIG. 18b provides K-S statistics for genes that had higher SNP frequencies with more than two standard deviations (SD). FIG. 18c reflects non-synonymous mutation frequencies of the genes in the core regions. FIG. 18d provides K-S statistics for genes that had higher non-synonymous mutation frequencies with more than 2 standard deviations.

[0051] FIG. 19 provides the distances between P. acnes strains in the same lineage (FIG. 19a) and in different lineages (FIG. 19b).

[0052] FIG. 20 reflects that P. acnes strains within each lineage share unique non-core genomic regions. Rows represent 82 P. acnes genomes and columns represent 314 non-core regions that are longer than 500 bp. The genomes and the non-core regions were clustered based on similarity, respectively. The width of each block plotted is not proportional to the genomic length of each non-core region. The presence of a non-core region is colored in yellow, and the absence is colored in blue. The color schemes used for RT and clades are the same as in FIG. 16.

[0053] FIG. 21 provides CRISPR spacer sequences in RT2 and RT6 strains. A total of 48 CRISPR spacer sequences were found in 11 P. acnes genomes, 29 of which were unique. Some CRISPR spacers were found in multiple strains. For example, spacer 2 (S2) was shared by HL060PA1 and HL082PA2. Spacer 17 (S17) was shared by J139, ATCC11828, HL110PA3, HL110PA4, HL042PA3 and HL202PA1. Spacer 18 (S18) was shared by J139, ATCC11828, HL110PA3, HL110PA4, and HL202PA1. The tree was from FIG. 16 constructed based on the 123,223 SNPs in the core regions.

[0054] FIG. 22 reflects genes with putative lipase activity in the P. acnes genomes. FIG. 22a gives a summary of 13 genes with putative lipase activity based on the annotations of KPA171202 and SK137 genomes. FIG. 22b reflects Insertions/deletions and frameshift observed in ORF HMPREF0675-4856.

[0055] FIG. 23 reflects fast detection of acne associated P. acnes strains using multiplex PCR targeting loci 1, 2, and 3.

[0056] FIG. 24 shows the relative abundances of Locus 1 and Locus 2 as compared to the housekeeping gene Pak.

[0057] FIG. 25 reflects qPCR triplex amplification plots for clinical samples #1

[0058] (FIG. 25A) and #2 (FIG. 25B) showing amplification of P. acnes Locus 1, Locus 3, and Pak.

[0059] FIG. 26 shows the evolutionary relationships/phylogenetic tree of 32 phages.

[0060] FIG. 27 shows a diagram of the methods of the invention for the diagnosis and personalization of therapy for acne.

[0061] FIG. 28 shows a flow chart of the methods of the invention for the diagnosis and personalization of therapy for acne.

[0062] FIG. 29 provides P. acnes phage genomes and annotations. Genome organizations of all 15 phages are shown. Hatched arrows in previously published genomes represent newly annotated ORFs proposed. Italicized legend entries refer to newly-annotated or revised ORFs.

[0063] FIG. 30 provides a phylogenetic tree of 29 sequenced phage genomes constructed based upon the 6,148 SNPs in the core regions. Branches with bootstrap values less than 80 (based on 200 resamplings) were collapsed.

[0064] FIG. 31 provides phylogentic trees based on the genome sequences. FIG. 31a provides a phylogenetic tree constructed based on the entire genome sequences of all 16 phages. With the exception of PHL112N00, the phylogenetic relationships among the phages remain the same as using the core regions only, shown in FIG. 30. FIG. 31b shows the phylogenetic tree that was constructed using only the left-arm of the genomes, which are highly conserved among the phages. FIG. 31s shows the phylogenetic tree that was constructed using only the right-arm coding regions. Groups I and II from FIG. 30 are also indicated in the trees. Branches with bootstrap values less than 80 (based on 5,000 resamplings) were collapsed.

[0065] FIG. 32 shows the phylogentic trees constructed based upon the nucleotide sequences of amidase (FIG. 32a) and head protein (FIG. 32b) from all phages, including the sequences from Lood et al. The phylogenetic relationships among the phages from the previous study remain the same in these trees. Groups I and II remain the same as in the genome shown in FIG. 30.

[0066] FIG. 33 reflects multiple alignments generated for genomes from Groups I and II of closely-related phages. Sites of nucleotide variations are mapped to a member from each group. The density of variable sites in each 50-nt window of the genome is indicated in red, with 100% density indicating that all 50 sites in the window vary between the group members. FIG. 33a provides variations among Group I phages (PHL010M04, PHL066M04, PHL073M02) mapped to the PHL010M04 genome. FIG. 33b provides variation among Group II phages (PHL115M02, PHL085M01, PHL085N00, PHL037M02) mapped to the PHL115M02 genome. Gray arrows represent ORFs in each genome.

[0067] FIG. 34 shows host range and specificity of P. acnes phages. The susceptibility/resistance of 66 P. acnes strains, three P. humerusii strains, and one P. granulosum strain against 15 newly sequenced phages is shown. Dendrograms on the top and to the left represent the respective phylogenetic trees of the phages and P. acnes strains (only topology is shown). “S” indicates that the tested Propionibacterium strain was susceptible to the tested phage. Numbers in red represent the fold increase in resistance of the Propionibacteria strains against phages relative to P. acnes strain ATCC6919.

[0068] FIG. 35 provides a correlation between P. acnes resistance to phages and the presence of matched CRISPR spacers. The colored pixels in each cell represent the CRISPR spacers encoded in each P. acnes strain (shown in rows). Each red pixel means that this spacer has an exact protospacer match in the corresponding phage (shown in columns). Each orange pixel means that this spacer has a partially matched protospacer (one to two mismatches) in the corresponding phage. Gray pixels mean no matched protospacers. Pink cells indicate the bacterial resistance to the phages.

[0069] FIG. 36 reflects that each of the 15 sequenced phages was aligned to all 8 CRISPR spacer arrays identified in the P. acnes strains to identify protospacer sequences in each phage genome that have an exact match (red) or up to two mismatches (orange). Plus- and minus-strand protospacers are shown above and below the genomes, respectively.

[0070] FIG. 37 reflects sequence conservation in protospacers and PAMs. The protospacers that match exactly to the CRISPR spacers encoded in strain HL042PA3 and their associated PAM sequences are shown. Sequence conservation among the protospacer motifs from the phages that HL042PA3 is resistant to is shown in (A) and susceptible to is shown in (B).

### DETAILED DESCRIPTION

[0071] In one embodiment, the invention provides a method for determining whether an individual possesses acne comprising: obtaining a skin sample from an individual; isolating bacterial DNA from said sample; amplifying 16S ribosomal DNA in said sample; sequencing said amplified DNA products; and typing the individual's DNA based on one or more of the ten major ribotypes (RTs) of P. acnes strains, RT1-RT10 (SEQ ID NOs 1-10), wherein said typing occurs by determining whether said individual possesses one or more of RT1-RT10 and wherein said individual is diagnosed as having acne if said individual possesses RT4, RT5, RT7, RT8, RT9, or RT10. For example, said individual may be diagnosed as having acne if said individual possesses RT4 (SEQ ID NO:4), RT5 (SEQ ID NO:5), or RT8 (SEQ ID NO:8).

[0072] In another embodiment, the invention provides a method for diagnosing different types of acne comprising: obtaining a skin sample from a subject; isolating bacterial DNA from said sample; amplifying 16S ribosomal DNA in said sample; sequencing said amplified DNA products; and typing the subject's DNA based on one or more of the five major microbiome types of P. acnes strains, wherein said subject is diagnosed as having acne if said subject is typed to microbiome IV or V.

[0073] In yet another embodiment, the invention provides a method for rapidly diagnosing acne comprising: obtaining a skin sample from a subject; isolating bacterial DNA from said sample; using one or more primer sets to amplify said DNA; and analyzing said amplified DNA for the presence of a sequence having at least 95% homology with at least one of SEQ ID NOs 29-32 and 82-434, wherein said subject is diagnosed as having acne if the presence of a sequence having at least 95% homology with at least one of SEQ ID NOs 29-32 and 82-434 exists. For example, said amplified DNA may be analyzed for the presence of a sequence having at least 99% homology with at least one of SEQ ID NOs 29-32 and 82-434 and wherein said subject is diagnosed as having acne if the presence of a sequence having at least 99% homology with at least one of SEQ ID NOs 29-32 and 82-434 exists. As another example, said amplified DNA may be analyzed for the presence of at least one of SEQ ID NOs 29-32 and 82-434 and wherein said subject is diagnosed as having acne if the presence of at least one of SEQ ID NOs 29-32 and 82-434 exists.

[0074] In another embodiment, the invention provides a method for rapidly diagnosing acne comprising: obtaining a skin sample from a subject; isolating bacterial DNA from said sample; using one or more primer sets to amplify said DNA; using one or more probes to detect said amplified DNA; and analyzing said probe signals for the presence of Locus 1 (at least one sequence having at least 95% homology to at least one of SEQ ID NOs 29 and 82-97), Locus 2 (at least one sequence having at least 95% homology to at least one of SEQ ID NOs 30 and 98-186), Locus 3 (at least one sequence having at least 95% homology to at least one of SEQ ID NOs 31 and 187-423), and/or Locus 4 (at least one sequence having at least 95% homology to at least one of SEQ ID NOs 32 and 424-434), wherein said subject is diagnosed as having acne if one or more of Loci 1-4 are present. For example, the signals may be analyzed for the presence of Locus 1, Locus 2, Locus 3, and/or Locus 4 based upon at least 99% homology or 100% homology.

[0075] In the foregoing methods, a primer of said primer sets may be selected from the group consisting of SEQ ID NOs 11, 12, 17, and 18 (for Locus 1), SEQ ID NOs 13, 14, 20, and 21 (for Locus 2), SEQ ID NOs 15, 16, 23, and 24 (for Locus 3), and SEQ ID NOs 26 and 27 (for Locus 4). In the foregoing methods, said probes may be SEQ ID NO:19 (for Locus 1), SEQ ID NO:22 (for Locus 2), SEQ ID NO:25 (for Locus 3), and SEQ ID NO:28 (for Locus 4).

[0076] In yet another embodiment, the invention provides a vaccine for the prevention and/or treatment of acne caused by P. acnes comprising a heat inactivated P. acnes strain, an attenuated protein of said strain, or combination thereof, wherein said strain is an RT4 strain, an RT5 strain, an RT7 strain, an RT8 strain, an RT9 strain, or an RT10 strain.

[0077] In yet another embodiment, the invention provides a vaccine for the prevention and/or treatment of acne caused by P. acnes comprising a heat inactivated P. acnes strain, an attenuated protein of said strain, or combination thereof identified to be specific to a subject based on 16S rDNA sequence analysis of the strains of P. acnes affecting said subject.

[0078] With regard to the vaccines, said heat inactivated P. acnes strain, attenuated protein, or combination thereof may be specific for at least one of unique genomic loci, regions, or sequences identified for the strains of P. acnes. Said heat inactivated P. acnes strain, attenuated protein, or combination thereof may be specific for at least one of Locus 1 (SEQ ID NOs 29 and 82-97), Locus 2 (SEQ ID NOs 30 and 98-186), Locus 3 (31 and 187-423), and Locus 4 (32 and 424-434).

[0079] In yet another embodiment, the invention provides a method for the personalized treatment of acne comprising determining the strains of P. acnes affecting a subject and treating said subject with an active ingredient directed to at least one detected strain of P. acnes, wherein the active ingredient comprises a drug targeting specific strains of P. acnes, wherein the targeting drug comprises small molecules, antisense molecules, siRNA, biologics, antibodies, and combinations thereof targeting genomic elements specific for strains of P. acnes associated with acne.

[0080] In yet another embodiment, the invention provides a method for treating acne comprising: administering an effective amount of a probiotic that comprises at least one strain of P. acnes that is associated with healthy or normal skin based on its 16S rDNA. Said strain may be an RT6 strain. Said strain may have at least 95% homology to SEQ ID NO:51, SEQ ID NO:52, SEQ ID NO:53, or SEQ ID NO:54, such as at least 99% homology or 100% homology.

[0081] In yet another embodiment, the invention provides a method for treating acne comprising: administering an effective amount of a metabolite produced by a strain of P. acnes that is associated with healthy or normal skin, wherein said metabolite is selected from the group comprising bacterial culture supernatant, cell lysate, proteins, nucleic acids, lipids, and other bacterial molecules. Said strain may be an RT6 strain. Said strain may have at least 95% homology to SEQ ID NO:51, SEQ ID NO:52, SEQ ID NO:53, or SEQ ID NO:54, such as at least 99% homology or 100% homology.

[0082] In yet another embodiment, the invention provides a method for treating acne in a subject comprising: administering an effective amount of a drug specifically targeting RT4, RT5, RT7, RT8, RT9, or RT10, when said subject is determined to possess RT4, RT5, RT7, RT8, RT9, or RT10, respectively. The earlier-described methods may be performed prior to administration of said drug. Said drug may be a small molecule, antisense molecule, siRNA, biologic, antibody, or combination thereof.

[0083] In yet another embodiment, the invention provides a composition comprising at least one strain of P. acnes that is associated with healthy or normal skin. Said strain may be an RT6 strain. Said strain may have at least 95% homology to SEQ ID NO:51, SEQ ID NO:52, SEQ ID NO:53, or SEQ ID NO:54, such as at least 99% homology or 100% homology.

[0084] In yet another embodiment, the invention provides a method for diagnosing IB-3-based acne comprising: obtaining a skin sample from a subject; isolating bacterial DNA from said sample; using one or more primer sets to amplify said DNA; and analyzing said amplified DNA for the presence of a sequence having at least 95% homology with at least one of SEQ ID NOs 55-81, wherein said subject is diagnosed as having IB-3-based acne if the presence of a sequence having at least 95% homology with at least one of SEQ ID NOs 55-81 exists.

[0085] In yet another embodiment, the invention provides a method for the personalized treatment of acne comprising determining the strain(s) of acne affecting a subject and administering to said subject an effective amount of at least one phage specifically directed to said strain(s). For example, the subject may be treated with phage directed against an RT4 strain, an RT5 strain, an RT7 strain, and RT8 strain, an RT9 strain, and/or an RT10 strain.

[0086] In yet another embodiment, the invention provides a method for treating an individual suffering from acne of microbiome type I comprising administering to said individual an effective amount of a phage, wherein said phage is selected from the group consisting of: PHL113M01 (SEQ ID NO:36), PHL111M01 (SEQ ID NO:33), PHL082M00 (SEQ ID NO:47), PHL060L00 (SEQ ID NO:34), PHL067M10 (SEQ ID NO:42), PHL071N05 (SEQ ID NO:41), PHL112N00 (SEQ ID NO:35), PHL037M02 (SEQ ID NO:40), PHL085N00 (SEQ ID NO:46), PHL115M02 (SEQ ID NO:43), PHL085M01 (SEQ ID NO:44), PHL114L00 (SEQ ID NO:37), PHL010M04 (SEQ ID NO:38), and PHL066M04 (SEQ ID NO:39).

[0087] In yet another embodiment, the invention provides a method for treating an individual suffering from acne of microbiome type I with IB-3 strain comprising administering to said individual an effective amount of a phage, wherein said phage is selected from the group consisting of: PHL082M00 (SEQ ID NO:47) and PHL071N05 (SEQ ID NO:41).

[0088] In yet another embodiment, the invention provides a method for treating an individual suffering from acne of microbiome type II comprising administering to said individual an effective amount of a phage, wherein said phage is selected from the group consisting of: PHL113M01 (SEQ ID NO:36), PHL060L00 (SEQ ID NO:34), PHL112N00 (SEQ ID NO:35), and PHL085M01 (SEQ ID NO:44).

[0089] In yet another embodiment, the invention provides a method for treating an individual suffering from acne of microbiome type III or dominant RT8 comprising administering to said individual an effective amount of a phage, wherein said phage is selected from the group consisting of: PHL113M01 (SEQ ID NO:36), PHL111M01 (SEQ ID NO:33), PHL082M00 (SEQ ID NO:47), PHL060L00 (SEQ ID NO:34), PHL067M10 (SEQ ID NO:42), PHL071N05 (SEQ ID NO:41), PHL112N00 (SEQ ID NO:35), PHL037M02 (SEQ ID NO:45), PHL085N00 (SEQ ID NO:46), PHL115M02 (SEQ ID NO:43), PHL085M01 (SEQ ID NO:44), PHL114L00 (SEQ ID NO:37), PHL073M02 (SEQ ID NO:40), PHL010M04 (SEQ ID NO:38), and PHL066M04 (SEQ ID NO:39).

[0090] In yet another embodiment, the invention provides a method for treating an individual suffering from acne of microbiome type IV comprising administering to said individual an effective amount of a phage, wherein said phage is selected from the group consisting of: PHL113M01 (SEQ ID NO:36), PHL111M01 (SEQ ID NO:33), PHL082M00 (SEQ ID NO:47), PHL060L00 (SEQ ID NO:34), PHL067M10 (SEQ ID NO:42), PHL071N05 (SEQ ID NO:41), PHL112N00 (SEQ ID NO:35), PHL037M02 (SEQ ID NO:45), PHL085N00 (SEQ ID NO:46), PHL115M02 (SEQ ID NO:43), PHL085M01 (SEQ ID NO:44), PHL114L00 (SEQ ID NO:37), PHL073M02 (SEQ ID NO:40), PHL010M04 (SEQ ID NO:38), and PHL066M04 (SEQ ID NO:39).

[0091] In yet another embodiment, the invention provides a method for treating an individual suffering from acne of microbiome type V comprising administering to said individual an effective amount of a phage, wherein said phage is selected from the group consisting of: PHL113M01 (SEQ ID NO:36), PHL111M01 (SEQ ID NO:33), PHL082M00 (SEQ ID NO:47), PHL060L00 (SEQ ID NO:34), PHL067M10 (SEQ ID NO:42), PHL071N05 (SEQ ID NO:41), PHL112N00 (SEQ ID NO:35), PHL037M02 (SEQ ID NO:45), PHL085N00 (SEQ ID NO:46), PHL115M02 (SEQ ID NO:43), PHL085M01 (SEQ ID NO:44), PHL114L00 (SEQ ID NO:37), PHL073M02 (SEQ ID NO:40), PHL010M04 (SEQ ID NO:38), and PHL066M04 (SEQ ID NO:39).

[0092] In yet another embodiment, the invention provides a method for treating a Propionibacterium humerusii-associated malady comprising administering to said individual an effective amount of a phage, wherein said phage is selected from the group consisting of: PHL113M01 (SEQ ID NO:36), PHL111M01 (SEQ ID NO:33), PHL082M00 (SEQ ID NO:47), PHL067M10 (SEQ ID NO:42), PHL071N05 (SEQ ID NO:41), PHL085N00 (SEQ ID NO:46), PHL085M01 (SEQ ID NO:44), PHL114L00 (SEQ ID NO:37), PHL073M02 (SEQ ID NO:40), and PHL010M04 (SEQ ID NO:38).

[0093] In yet another embodiment, the invention provides a kit for diagnosing acne in a subject, wherein said kit comprises: at least one primer selected from the group comprising SEQ ID NOs 11-18, 20, 21, 23, 24, 26, and 27; and instructions for use.

[0094] In yet another embodiment, the invention provides a kit for diagnosing acne in a subject, wherein said kit comprises: at least one primer selected from the group comprising SEQ ID NOs 11-18, 20, 21, 23, 24, 26, and 27; at least one probe selected from the group comprising SEQ ID NOs 19, 22, 25, and 28; and instructions for use.

[0095] Nucleotide, polynucleotide, or nucleic acid sequence will be understood to mean both a double-stranded or single-stranded DNA in the monomeric and dimeric forms and the transcription products of said DNAs.

[0096] Homologous nucleotide sequence means a nucleotide sequence having at least a percentage identity with the bases of a nucleotide sequence according to the invention of at least 80%, preferably 90%, 95%, 96%, 97%, 98%, 99% or 100%. This percentage is statistical and the differences between two nucleotide sequences may be determined at random or over the whole of their length.

[0097] The invention comprises the polypeptides encoded by a nucleotide sequence according to the invention, including a polypeptide whose sequence is represented by a fragment. Herein, the terms polypeptide, peptide, and protein are interchangeable.

[0098] Polypeptides allow monoclonal or polyclonal antibodies to be prepared which are characterized in that they specifically recognize the polypeptides. The invention relates to mono- or polyclonal antibodies or their fragments, or chimeric antibodies, characterized in that they are capable of specifically recognizing a polypeptide.

[0099] Polypeptides used in vaccine compositions according to the invention may be selected by techniques known to the person skilled in the art such as, for example, depending on the capacity of said polypeptides to stimulate the T cells, which is translated, for example, by their proliferation or the secretion of interleukins, and which leads to the production of antibodies directed against said polypeptides. Vaccine combinations will preferably be combined with a pharmaceutically acceptable vehicle and, if need be, with one or more adjuvants of the appropriate immunity. Pharmaceutically acceptable vehicle means a compound or a combination of compounds that does not provoke secondary reactions and which allows, for example, the facilitation of the administration of the active compound, an increase in its duration of life and/or its efficacy in the body, an increase in its solubility in solution, or an improvement in its conservation.

[0100] Applicants identified ten major lineages of Propionibacterium acnes and five major microbiome types in the human pilosebaceous unit (“pore”), where acne arises. Some of the P. acnes lineages and microbiome types are highly enriched in acne patients and some are associated with healthy skin. The unique genomic components of each major lineage, including a linear plasmid that is unique to acne-associated lineages, have been identified. This information is used to, for example: (1) for a method/kit to isolate bacterial DNA/RNA from pilosebaceous units for downstream analysis: (2) rapidly and accurately detect/diagnose/identify the microbiome type of the affected subject and the major strains of P. acnes present in the pores of the affected subject; (3) develop vaccines against acne-associated P. acnes strains; (4) develop probiotics using the strains associated with healthy skin in topical creams, solutions, and the like; (5) develop drugs, including small molecules, biologics, and antibodies targeting the genetic elements and biological pathways unique to the P. acnes strains associated with acne, and (6) to develop bacteriophage-based strain specific therapy to treat acne.

[0101] Once the microbiome type of a subject affected with acne is diagnosed, several approaches described below may be used formulate an effective treatment plan. For example, if the subjects have microbiome types IV or V, or are dominated by P. acnes RT10 strains, it is less likely that antibiotic treatment will succeed because these strains are antibiotic resistant. However, other method treatments remain available, such as retinoids.

[0102] According to one embodiment of the invention, in a case where the subject has the virulent ribotypes, including RT4, RT5, and RT8, target specific drugs including small molecules, biologics, and antibodies may be more effective treatments. In a preferred embodiment of the invention, such a patient may be treated with antibodies targeting the genetic elements and biological pathways that are unique to P. acnes strains associated with acne.

[0103] According to another embodiment of the invention, in a case where the dominant P. acnes strains affecting the subject do not harbor a set of CRISPR/Cas, the additional treatment of phage therapy may be more effective.

[0104] The present invention also pertains to alternative treatment strategies for acne treatment to balance the relative abundance of P. acnes strains by promoting the growth of health-associated strains.

[0105] The present invention pertains to methods and kits to isolate bacterial DNA/RNA from pores of affected subjects for downstream genetic analysis. More specifically, the present invention pertains to protocols for the extraction of bacterial genomic DNA and RNA from microcomedone samples. In one particular embodiment of the invention, Biore® Deep Cleansing Pore Strips may be used to sample the bacteria from a subject. Genomic DNA may be extracted according to methods known in the art. For example, the QIAamp DNA Micro Kit (Qiagen) is a commercially available kit that may be used to extract genomic DNA from the supernatant obtained by lysing cells/microcomedones using a beadbeater.

[0106] The present invention also pertains to fast and accurate methods and kits for the detection and/or diagnosis of microbiome types in affected subjects. The microbiome typing/microbiome-specific treatment is based on ten major lineages of P. acnes strains and five major microbiome types in the human pilosebaceous unit found through a comprehensive metagenomic analysis using full length 16S rDNA sequencing.

[0107] Indeed, samples were PCR-amplified using 16S rDNA specific primers with the following sequences: 27f-MP 5′AGRGTTTGATCMTGGCTCAG-3′ and 1492r-MP 5′-TACGGYTACCTTGTTAYGACTT-3′. Optionally, following gel purification, the 1.4 Kb product is excised and further purified using, for example, a Quigen QIAquick Gel Extraction Kit. The purified product is cloned into OneShot E coli. cells using, for example, a TOPO TA cloning kit from Invitrogen. Sequencing is done with a universal forward, universal reverse, and for a subset, internal 16S rDNA primer 907R with sequences of TGTAAAACGACGGCCAGT (forward), CAGGAAACAGCTATGACC (reverse), and CCGTCAATTCCTTTRAGTTT (907R). Sequence reactions were loaded on ABI 3730 machines from ABI on 50 cm arrays with a long read run module.

[0108] Each lineage of P. acnes has unique genomic loci, regions, and sequences. Accordingly, specific primers may be generated to target the lineage-specific genomic regions to detect the presence or absence of each lineage, as well as the relative amount of each lineage using methods known in the art, such as PCR/qPCR. This occurs within several hours of obtaining the samples. Prior to Applicants' invention, this required much more time—often weeks using culture-based methods. According to one embodiment of the invention, affected subjects are grouped for microbiome specific treatments based on these diagnoses.

[0109] According to the methods of the present invention, unique genomic loci 1, 2, and 3 for strains of ribotypes 4 and 5 have been shown to be associated with acne. Using specific primers targeting for loci 1, 2 and 3, lineages that contain these loci can be distinguished from lineages that lack these loci. In addition, using PCR/qPCR techniques, the relative abundance of each strain may also be detected. Analysis of a mock community has shown that isolates with loci 1, 2 and 3 in an abundance of 7.5% or higher in the microbiome may be detected using these techniques. Given the sensitivity of qPCR, lower abundance levels to a few DNA copies may also be detectable.

[0110] It has previously been reported that heat inactivation of P. acnes may be an effective means of developing P. acnes-based vaccines. See T. Nakatsuji et al., 128(10) J. Invest. Dermatol, 2451-2457 (October 2008). In one aspect of the present invention, vaccines are developed against acne-associated P. acnes strains. In another aspect of the present invention, personalized vaccines are developed against acne-associated P. acnes strains. In yet another aspect of the present invention, vaccines are developed against acne-associated P. acnes strains using inactive P. acnes strains or heat attenuated proteins. Strains suitable for use as vaccines may be identified based on 16S rDNA sequencing, identifying lineages of P. acnes strains associated with acne, and the unique genomic loci, regions, and sequences for each lineage to specifically target strains of P. acnes associated with acne and not those strains associated with healthy skin.

[0111] According to methods described above, it has been discovered that P. acnes strains with ribotypes 4, 5, 7, 8, 9, and 10 are highly associated with acne. In one embodiment of the present invention, a vaccine is raised against these individual strains separately or in combination. Similarly, the genes in loci 1, 2, and 3 may be targets for vaccination because these loci are unique to ribotypes 4 and 5, and are not found in commensal strains. Locus 4, which is unique to ribotype 8 may also serve as a potential target for vaccine therapy. The list of genes encoded in loci 1, 2, 3, and 4 are shown in Table 2.

[0112] The present invention also pertains to probiotics developed using P. acnes strains associated with healthy skin in medicines, compositions, topical creams, solutions, or other cosmetic products. Probiotics have, in the past, been used in topical creams. PROBIOTIC LAB™ announced that mixture of 14 specific strains of bacteria was used for treatment of cystic acne (http://www.probiotic-lab.com/aboutusprobioticlab.html). Probiotic skin care/DERMBIOTIX has a product line—Probiotic Collagen Complex (PC3), which is claimed to have targeted anti-aging benefits to the skin. However, this is not targeted to acne treatment. Probiotic Collagen Complex (PC3) infuses the skin with the positive bacteria required to effectively combat and eradicate excess negative bacteria caused by external factors (http://www.dermbiotix.com). However, prior to the present invention there existed no skin probiotic product reported for acne treatment using P. acnes strains associated with healthy/normal skin. In one aspect of the present invention, skin probiotics are developed for acne treatment using P. acnes strains associated with healthy/normal skin. In another aspect of the present invention, skin probiotics are developed for acne treatment using P. acnes strains associated with healthy/normal skin based on the 16S rDNA sequencing.

[0113] In one particular embodiment of the present invention the RT6 lineage of P. acnes and associated with healthy skin is used as a topical product. In yet another embodiment of the present invention the RT6 lineage of P. acnes is used by inoculating this isolate on the human skin in order to compete off the acne associated strains. In another embodiment, molecules, including proteins, nucleic acids, lipids, and other metabolites, supernatant of cultures, and/or cell lysate of these strains may be used at probiotics.

[0114] The present invention also pertains to drugs targeting acne associated P. acnes strains. This is based upon multiple genome comparison of P. acnes in combination with 16S rDNA metagenomic analysis, thereby identifying certain strains and genomic variations associated with acne. Drugs intended to target acne associated P. acnes include custom designed small molecules, antisense molecules, siRNA molecules, biologics, and antibodies targeting genomic elements specific for strains which are associated with acne. Antisense RNA, antibodies, or small molecules can be designed targeting loci 1, 2, 3, and 4. Strains with ribotypes 4, 5, and 10 are antibiotic resistant. Thus, there is a need in the art for new antibiotics targeting ribotypes 4, 5, and 10.

[0115] The present invention also pertains to personalized phage therapy for subjects affected with acne comprising phages specific to certain strains of P. acnes. Certain companies provide phage therapy for acne patients, such as the Phage Therapy Center™, http://www.phagetherapycenter.com/pii/PatientServlet? command=static_home). However, such companies provide no information on the bacterial host specificity of the phages used for the therapy. P. acnes is commensal and some strains play a protective role for hosts. In one embodiment of the invention, personalized phage therapies include a selections of phages targeting P. acnes strains that have been shown to lack a protective role for subjects affected by acne. In yet another embodiment of the invention, personalized phage therapy may be developed according to their bacterial host specificity of the phages to target specific strains of P. acnes, leaving health associated strains intact. In addition, it is possible to identify the structure of P. acnes lineages of the affected subjects and use that structure to predict resistance to phage infection or plasmid conjugation to better target specific phage therapies. For example, P. acnes lineages RT2 and RT6 have a CRISPR/Cas structure, indicating they have resistance against certain phage infection and plasmid conjugation. Table 5 shows the sensitivity and resistance of specific P. acnes strains to specific P. acnes phages.

[0116] The invention is described in more detail in the following illustrative examples. Although the examples may represent only selected embodiments of the invention, the following examples are illustrative only and in no way limiting.

### EXAMPLES

### Example 1

### Analysis of Propionibacterium acnes Strain Populations in the Human Skin Microbiome Associated with Acne

[0117] The human skin microbiome plays important roles in skin health and disease. However, prior to Applicants' invention the bacterial population structure and diversity at the strain level was poorly understood. The inventors compared the skin microbiome at the strain level and genome level of Propionibacterium acnes, a dominant skin commensal, between 49 acne patients and 52 healthy individuals by sampling the pilosebaceous units on their noses. Metagenomic analysis demonstrated that while the relative abundances of P. acnes were similar, the strain population structures were significantly different in the two cohorts. Certain strains were highly associated with acne and other strains were enriched in healthy skin. By sequencing 66 novel P. acnes strains and comparing 71 P. acnes genomes, the inventors identified potential genetic determinants of various P. acnes strains in association with acne or health. The analysis indicates that acquired DNA sequences and bacterial immune elements may play roles in determining virulence properties of P. acnes strains and some may be targets for therapeutic interventions. This study demonstrates a previously-unreported paradigm of commensal strain populations that explains the pathogenesis of human diseases. It underscores the importance of strain level analysis of the human microbiome to define the role of commensals in health and disease.

### Background

[0118] The diversity of the human microbiota at the strain level and its association with human health and disease are largely unknown. However, many studies had shown that microbe-related human diseases are often caused by certain strains of a species, rather than the entire species being pathogenic. Examples include methicillin-resistant Staphylococcus aureus (MRSA) (Chambers and Deleo, 2009; Chen et al., 2010; Hansra and Shinkai) and Escherichia coli 0157 (Chase-Topping et al., 2008; Tarr et al., 2005). Acne vulgaris (commonly called acne) is one of the most common skin diseases with a prevalence of up to 85% of teenagers and 11% of adults (White, 1998). Although the etiology and pathogenesis of acne are still unclear, microbial involvement is considered one of the main mechanisms contributing to the development of acne (Bojar and Holland, 2004; Cunliffe, 2002). In particular, Propionibacterium acnes has been hypothesized to be an important pathogenic factor (Webster, 1995). Antibiotic therapy targeting P. acnes has been a mainstay treatment for more than 30 years (Leyden, 2001). However, despite decades of study, it remained unclear as to how P. acnes contributes to acne pathogenesis while being a major commensal of the normal skin flora (Bek-Thomsen et al., 2008; Cogen et al., 2008; Costello et al., 2009; Dominguez-Bello et al., 2010; Fierer et al., 2008; Gao et al., 2007; Grice et al., 2009). Whether P. acnes protects the human skin as a commensal bacterium or functions as a pathogenic factor in acne, or both, remained to be elucidated.

[0119] Thus, Applicants compared the skin microbiome at the strain level and genome level in 49 acne patients and 52 normal individuals using a combination of metagenomics and genome sequencing. First, for each sample, 16S ribosomal DNA (rDNA) was amplified, approximately 400 clones were sequenced, and an average of 311 nearly full length 16S rDNA sequences were analyzed. The population structure of P. acnes strains was determined in each sample. Second, each P. acnes strain was assigned an “acne index” by calculating its prevalence in acne patients based on the 16S rDNA metagenomic data. The P. acnes strains associated with the acne patient group were identified, as well as the strains enriched in the individuals with normal skin. This metagenomic approach is fundamentally different than prior approaches in determining disease associations; it is more powerful and less biased than traditional methods by bypassing the biases and selection in strain isolation and culturing. Lastly, 66 novel P. acnes strains were sequenced and 71 P. acnes genomes compared covering the major lineages of P. acnes found in the skin microbiota. By combining a metagenomic study of the skin microbiome and genome sequencing of this major skin commensal, Applicants' study provided insight into bacterial genetic determinants in acne pathogenesis and emphasizes the importance of strain level analysis of the human microbiome to understand the role of commensals in health and disease.

### Results

[0120] P. acnes Dominates the Pilosebaceous Unit

[0121] Applicants characterized the microbiome in pilosebaceous units (“pores”) on the nose collected from 49 acne patients and 52 individuals with normal skin. Nearly full length 16S rDNA sequences were obtained using Sanger method, which permitted analyzing the P. acnes at the strain level. After quality filtering, the final dataset contained 31,461 16S rDNA sequences ranging from position 29 to position 1483. 27,358 of the sequences matched to P. acnes with greater than 99% identity. The data demonstrated that P. acnes dominates the microbiota of pilosebaceous units, accounting for 87% of the clones (FIG. 1). Other commonly found species in pilosebaceous units included Staphylococcus epidermidis, Propionibacterium humerusii, and Propionibacterium granulosum, each representing 1%-2.3% of the total clones. A total of 536 species level operational taxonomic units (SLOTUs) belonging to 42 genera and six phyla were identified in the samples (Table S1).

TABLE S1
Six phyla and 42 genera found in pilosebaceous units.

| Phylum | Genus | Phylum | Genus |
|---|---|---|---|
| Actinobac- | Actinobaculum | Bacteroidetes | Chryseobacterium |
| teria | Corynebacterium | | Niastella |
| | Gordonia | | Patabacteroides |
| | Kocuria | | Prevotella |
| | Mictobacterium | Proteobac- | Caulobacteraceae |
| | Propionibacterium | teria | Citrobacter |
| Firmicutes | Anaerococcus | | Cupriavidus |
| | Anoxybacillus | | Delftia |
| | Bacillus | | Diaphorobacter |
| | Enterococcus | | Haemophilus |
| | Erysipelothrix | | Klebsiella |
| | Finegoldia | | Massilia |
| | Gemella | | Neisseriaceae |
| | Lactobacillus | | Novosphingobium |
| | Paenibacillus | | Pelomonas |
| | Peptoniphilus | | Phyllobacterium |
| | Pepto- | | Ralstonia |
| | streptococcaceae | | |
| | Ruminococcaceae | | Shigella |
| | Staphylococcus | | Sphingomonas |
| | Streptococcus | | Stenotrophomonas |
| Fuso- | Fusobacterium | Cyanobac- | Streptophyta |
| bacteria | | teria | |

[0122] To bypass the potential biases due to PCR amplification and due to uneven numbers of 16S rDNA gene copies among different species, a metagenomic shotgun sequencing of the total DNA pooled from the pilosebaceous unit samples of 22 additional normal individuals was performed. Microbial species were identified by mapping metagenomic sequences to reference genomes. The results confirmed that P. acnes was the most abundant species (89%) (FIG. 1). This is consistent with the results obtained from 16S rDNA sequencing (87%).

[0123] For the 16S rRNA sequence, positions 27 to 1492 were PCR amplified. Yet, when analyzing the sequence only positions 29-1483 are studied. The numbering of positions is based on the E. coli system of nomenclature. Thus, the sequences between 29-1483 are important for determining the ribotype (there are many ribotypes, not just 10). As for the top 10 ribotypes, sequences between positions 529-1336 of the 16A rRNA are sufficient.

Different P. acnes Strain Populations in Acne

[0124] There was no statistically significant difference in the relative abundance of P. acnes when comparing acne patients and normal individuals. It was then examined whether there were differences at the strain level of P. acnes by extensively analyzing the P. acnes 16S rDNA sequences. Herein, each unique 16S rDNA sequence as a 16S rDNA allele type is called a ribotype (RT). The most abundant P. acnes sequence was defined as ribotype 1 (RT1) (SEQ ID NO:1). All other defined ribotypes have 99% or greater sequence identity to RT1. Similar to the distributions seen at higher taxonomical levels (Bik et al.), at the strain level a few ribotypes were highly abundant in the samples with a significant number of rare ribotypes (FIG. 2). After careful examination of the sequence chromatograms and manual correction of the sequences, a total of 11,009 ribotypes were assigned to the P. acnes 16S rDNA sequences. Most of the minor ribotypes were singletons. On average, each individual harbored 3±2 P. acnes ribotypes with three or more clones. Based on the genome sequences described below, all the sequenced P. acnes strains have three identical copies of 16S rDNA genes (see note below). This allowed the P. acnes strain populations in individuals based on the 16S rDNA sequences to be compared. The top ten major ribotypes with more than 60 clones and found in multiple subjects are shown in Table 1:

TABLE 1
Top ten most abundant ribotypes found in pilosebaceous units

| | | | | Percentage | Percentage | |
|---|---|---|---|---|---|---|
| | Nucleotide | | | of clones | of clones | |
| | changes | Number of | Number of | from acne | from normal | |
| Ribotype | from RT1 | subjects | clones | patients^{a} | individuals^{b} | p-value^{c} |
| RT1 | — | 90 | 5536 | 48% | 52% | 0.84 |
| RT2 | T854C | 48 | 1213 | 51% | 49% | 0.36 |
| RT3 | T1007C | 60 | 2104 | 40% | 60% | 0.092 |
| RT4 | G1058C, A1201C | 23 | 275 | 84% | 16% | 0.049 |
| RT5 | G1058C | 15 | 205 | 99% | 1% | 0.00050 |
| RT6 | T854C, C1336T | 11 | 262 | 1% | 99% | 0.025 |
| RT7 | G529A | 10 | 188 | 99% | 1% | 0.12 |
| RT8 | G1004A, T1007C | 5 | 239 | 100% | 0% | 0.024 |
| RT9 | G1268A | 4 | 68 | 99% | 1% | 0.29 |
| RT10 | T554C, G1058C | 5 | 61 | 100% | 0% | 0.024 |

^{a}The percentage was calculated after the number of clones of each ribotype was normalized by the total number of clones in acne patients (acne index).
^{b}The percentage was calculated after the number of clones of each ribotype was normalized by the total number of clones in normal individuals.
^{c}Mann-Whitney-Wilcoxon rank sum test.

[0125] Analysis of the top ten ribotypes showed both disease-specific and health-specific associations. The three most abundant ribotypes (RT1, RT2 and RT3) were fairly evenly distributed among acne and normal individuals. However, the next seven major ribotypes were significantly skewed in their distributions (Table 1). Ribotypes 4, 5, 7, 8, 9, and 10 were found predominantly in acne patients, with four of these six statistically significantly enriched in acne (p<0.05, Wilcoxon test). Ribotypes 4, 5, and 10 contain a nucleotide substitution G1058C in the 16S rDNA sequences, which has previously been shown to confer increased resistance to tetracycline (Ross et al., 1998; Ross et al., 2001). However, only a small percentage of the subjects in our study harboring these ribotypes had been treated with antibiotics (FIG. 3), therefore enrichment of these three ribotypes in the acne group was not correlated with antibiotic treatment. This is consistent with previous studies, which showed that previous use of antibiotics was not always associated with the presence of antibiotic resistant strains and that some patients who were not previously treated with antibiotics harbored strains already resistant to antibiotics (Coates et al., 2002; Dreno et al., 2001). One ribotype, RT6, although detected in only 11 subjects, was strongly associated with normal skin (p=0.025, Wilcoxon test) (Table 1). Its relative abundance in the normal group was similar to that found in the healthy cohort data from the Human Microbiome Project (HMP) (see FIG. 3). The percentage of positive subjects ( 11/52) was similar as well. Three of the 14 HMP subjects had RT6 found in the anterior nares, and one additional subject had RT6 in the left retroauricular crease.

[0126] Based on the distributions of the top ten ribotypes, statistical analysis using several different tests showed significant differences in P. acnes population structure between acne and normal skin (FIG. 4). This is consistent with a principal coordinate analysis, where acne samples and normal skin samples were separated by mostly principal coordinates 1 and 2 (FIG. 4), explaining 44% and 20% of the variation, respectively.

[0127] To examine whether different individuals share similar P. acnes population structures, the samples were clustered based on the relative abundances of the top ten ribotypes. Five main microbiome types were observed at the P. acnes strain level (microbiome types I to V). Types IV and V, which are dominated by P. acnes RT4 and RT5, respectively, were mainly found in acne patients (FIGS. 5 and 6). The same five main microbiome types were observed in the HMP data and the data from Grice et al. (Grice at al., 2009) (see FIG. 7).

Genome Sequence Analysis of 71 P. acnes Strains

[0128] All of the top ten most abundant ribotypes differ from RT1 by only one or two nucleotide changes in the 16S rDNA sequence (Table 1). To determine whether such small changes in the 16S rDNA sequence reflect the lineages and evolutionary history at the genome level, 66 P. acnes isolates representing major ribotypes 1, 2, 3, 4, 5, 6, and 8 as well as two minor ribotypes, 16 and 532, were selected for genome sequencing. The genomes of these 66 isolates were fully sequenced and assembled to high quality drafts or complete genomes with 50× coverage or more. Five other P. acnes genomes, KPA171202 (Bruggemann et al., 2004), J165, J139, SK137, and SK187, were publicly-available and were included in the analysis. A phylogenetic tree based on 96,887 unique single nucleotide polymorphism (SNP) positions in the core genome obtained from these 71 P. acnes genomes was constructed. Most of the genomes with the same ribotypes clustered together. The tree indicates that the 16S rDNA ribotypes do represent the relationship of the lineages to a large extent and that 16S rDNA sequence is a useful molecular marker to distinguish major P. acnes lineages (FIGS. 8 and 9).

Genetic Elements Detected in P. acnes

[0129] A comparative genome analysis among all 71 genomes grouped by ribotypes was performed. The analysis revealed genetic elements by which acne-associated strains could contribute to acne pathogenesis and the elements by which health-associated strains could contribute to maintaining skin health. Specifically, now known are the unique genome regions of RT4 and RT5, which had a strong association with acne, and RT6, which was found enriched in normal skin. Three distinct regions, loci 1, 2, and 3, were found almost exclusively in strains that belong to clade IA-2 in the phylogenetic tree. Clade IA-2 consists of mainly RT4 and RT5 (FIGS. 8 and 10). Loci 1 and 2 are located on the chromosome. Locus 1 contains prophage-related genes and appears to be a genomic island. Locus 2 has plasmid integration sites and may be derived from a plasmid sequence. Locus 3 appears to be on a large mobile genetic element, likely a plasmid. The plasmid is approximately 55 Kb long and has inverted terminal repeats according to the finished genome HL096PA1. The sequence data suggest that the plasmid is linear and possibly originated from a phage (Hinnebusch and Tilly (1993)). All but one of the fifteen genomes of RT4 and RT5 have at least 60% of the genes of the plasmid represented, and all of them have regions homologous to the inverted terminal repeats in the plasmid, suggesting that they harbor the same or a similar linear plasmid (FIG. 8). The copy number of the plasmid in the genomes ranges from 1 to 3 based on genome sequencing coverage, which was confirmed by quantitative PCR (FIGS. 11 and 12).

[0130] The fact that acne-enriched RT4 and RT5 strains carry a linear plasmid and two unique loci of genomic islands indicates that these plasmid and chromosomal regions play a role in acne pathogenesis. In fact, the linear plasmid encodes a tight adhesion (Tad) locus, which has been suggested to play a role in virulence in other organisms (Kachlany et al., 2000; Schreiner et al., 2003). The complete Tad locus is found in all but one of the fifteen genomes of RT4 and RT5, and is only occasionally found in other ribotypes. Additionally, in locus 2, a Sag gene cluster is encoded, which has been shown to contribute to hemolytic activity in pathogens (Fuller et al., 2002; Humar et al., 2002; Nizet et al., 2000). FIG. 6 summarizes the genes that are mostly unique to RT4 and RT5, several of which play essential roles in virulence in other organisms. Some of these genes encoded in RT4 and RT5 increase virulence, promote stronger adherence to the human host, or induce a pathogenic host immune response.

[0131] In the genome comparison analysis, it was found that all the genomes of RT2 and RT6 encode Clustered Regularly Interspaced Short Palindromic Repeats (CRISPR). Among the sequenced genomes, RT2 and RT6 are the only ribotypes encoding CRISPR. CRISPR have been shown to confer protective “immunity” against viruses, phages, and plasmids (Horvath and Barrangou, 2010; Makarova et al., 2011). The CRISPR locus encoded in P. acnes consists of a series of cas genes—cas3, cse1, cse2, cse4, cas5e, cse3, cas1, and cas2, which are homologous to the CRISPR locus reported in E. coli (FIG. S10) and the CRISPR4 locus in Streptococcus thermophilus (Horvath and Barrangou, 2010).

[0132] CRISPR arrays are composed of a cluster of identical repetitive sequences separated by spacer sequences of similar length but with different nucleotide sequences. It has been found that spacer sequences are identical or with one or two mismatches to phage or plasmid DNA sequences. A total of 39 spacer sequences were found in eight P. acnes strains, 25 of which were unique as shown in Table 2.

TABLE 2
CRISPR spacer sequences found in the genomes of RT2 and RT6

| | | Spacer | | | Match |
|---|---|---|---|---|---|
| Ribotype | Strain | number | Spacer sequence | BLAST result | found |
| RT2 | HL001PA1 | 1 | CATGGCCTGCACACCAGGCGCTTTTAGCACCT | No hits | |
| | | 2 | CATGGCCTGCACACCAGGCGCTTTTAGCACCT | No hits | |
| | | 3 | CATGGCCTGCACACCAGGCGCTTTTAGCACCT | No hits | |
| | | 4 | GGCGTATGACGAGTTGTGGTCGGCGTTTCCTC | P. acnes phage PA6 gp15 | |
| | | | | (minor tail protein) | |
| | | 5 | CGGTGTTAACGGCTTGCCTGGCTTGGATGGAG | No hits | |
| RT2 | HL060PA1 | 1 | CGCCTACCGTCAGCTGACTCACGCCTCCGCGTT | No hits | |
| | | 2 | TCACACCAGTCATCAGCGTCATAGTCCTCTCGG | No hits | |
| RT2 | HL082PA2 | 1 | GGCTCAGCCCTGCCCGATGCCTACGCCAAATGG | C. leptum DSM 753 CLOLEP_00129 | Locus 3 |
| | | | | (cell wall-associated hydrolases | |
| | | | | (invasion-associated proteins)) | |
| | | 2 | TCACACCAGTCATCAGCGTCATAGTCCTCTCGG | No hits | |
| RT2 | HL103PA1 | 1 | CACCGGGCCCATCCCGGTCGGCCTCCTGAAAGG | C. leptum DSM 753 CLOLEP_00135 | Locus 3 |
| RT2 | HL106PA1 | 1 | GATCGAGTTGGCTGAGTCGAAGGTGTTGCGGTT | P. acnes phage PA6 gp16 | |
| | | | | (conserved protein) | |
| | | | | P. acnes phage PAD20 gp16 | |
| | | 2 | CTGCTCATCGCTCAGCTCCTGCGCCTCATCACA | No hits | |
| | | 3 | CTGCGCCAACAGCCGCATCTGATCCGAATACGG | P. acnes phage PA6 gp3 | |
| | | | | (phage portal protein) | |
| | | 4 | CGCAGCAATCTCAGAAGGCCACAACAAGTTCGT | P. acnes phage PA6 gp7 | |
| | | | | (conserved protein) | |
| | | | | P. acnes phage PAD20 gp7 | |
| | | | | P. acnes phage PAS50 gp7 | |
| | | 5 | CAAATCACCCAAGCCCAACACGCCGCCACCACC | No hits | |
| | | 6 | TGTCACCGATTCAATGTATCTATGAGTGGTGTA | No hits | |
| | | 7 | TTGGGTGGGTGAGGTCGGGTCGTCAGTCATGAG | No hits | |
| | | 8 | GTCGATGTCGAGATTGGCCTGGGGGTCCATGTC | Clostridium leptum DSM 753 | |
| | | | | CLOLEP_00142 | Locus 3 |
| | | 9 | ACGTCGTGAACGTACCCCTTGACGGAGACGGCA | No hits | |
| RT2 | J139 | 1 | CGAGGGCTACCACGTGGTCGATTTGGACTGTCG | C. leptum DSM 753 CLOLEP_00167 | Locus 2 |
| | | | | P. acnes SK137 HMPREF0675_3193 | |
| | | | | (domain of unknown function) | |
| | | 2 | CAGGCGCTCCACTCCCTCGCCCTGGCCACCAAC | No hits | |
| RT6 | HL110PA3 | 1 | CTATGTGGACAGTGTTGGTTACTGTGGGGGGAA | P. acnes phage PA6 intergenic region | |
| | | | | between gp45 and gp46 | |
| | HL110PA4 | 2 | GCACTGCACCGATATCGTCGTGGCTGTCACTTG | No hits | |
| | | 3 | CCCAGACAACCTCGACAACCTGTTCAGGGGATG | P. acnes phage PAS50 gp25 | |
| | | 4 | CATGGCTAGCCCGGATITTTGGCTGCCTGAGCG | P. acnes phage PA6 gp34 (mutidrug | |
| | | | | resistance protein-like transporters) | |
| | | | | P. acnes phage PAD20 gp34 | |
| | | | | (DNA helicase) | |
| | | 5 | CGGCCTGCGGCAGATTTTTGTTGCGTTGAATCC | P. acnes phage PA6 gp14 | |
| | | | | (tape measure protein) | |
| | | | | P. acnes phage PAD20 gp14 | |
| | | | | (tape measure protein) | |
| | | | | P. acnes phage PAS50 gp14 | |
| | | | | (tape measure protein) | |
| | | 6 | CGGGCAGAGGATGTGTTGCTCGTTCCTGGATGG | P. acnes phage PA6 gp32 | |
| | | | | (CHC2 zinc finger) | |
| | | | | P. acnes phage PAD20 gp32. | |
| | | | | (DNA primase) | |
| | | | | P. acnes phage PAS50 gp32 | |
| | | | | (DNA primase) | |
| | | 7 | GTTACGCTGGAACCCCCAATGAACACGCGAGAA | P. acnes phage PAD42 major | |
| | | | | head protein gene | |
| | | | | P. acnes phage PAD20 major | |
| | | | | head protein gene | |
| | | | | P. acnes phage PAD9 major | |
| | | | | head protein gene | |
| | | | | P. acnes phage PAS40 major head | |
| | | | | protein gene | |
| | | | | P. acnes phage PAS12 major head | |
| | | | | protein (gene | |
| | | | | P. acnes pimp PAS10 major | |
| | | | | head protein gene | |
| | | | | P. acnes phage PAD21 major | |
| | | | | head protein gene | |
| | | | | P. acnes phage PAS2 major | |
| | | | | head protein gene | |
| | | | | P. acnes phage PA6 gp6 | |
| | | | | (Phage capsid family) | |
| | | | | P. acnes phage PAS50 gp6 | |
| | | | | major head protein gene | |
| | | 8 | CGAGGGCTACCACGTGGTCGATTTGGACTGTCG | C. leptum DSM 753 CLOLEP_00167 | Locus 2 |
| | | | | P. acnes SK137 HMPREF0675_3193 | |
| | | | | (Domain of unknown function) | |
| | | 9 | CAGGCGCTCCACTCCCTCGCCCTGGCCACCAAC | No hits | |

Abbreviations:
BLAST, Basic Local Alignment Search Tool;
CRISPR, Clustered Regularly Interspaced Short Palindromic Repeat;
C. leptum, Clostridium leptum;
P. acnes, Propionibacterium acnes;
RT, ribotype.

[0133] As expected, most of the identifiable spacers target to known P. acnes phage sequences. However, among the unique CRISPR spacer sequences, one matched locus 2 on the chromosome and three matched the plasmid region (locus 3) in P. acnes genomes of mainly RT4 and RT5. This suggests that these loci may have been acquired by RT4 and RT5 strains, while the genomes of RT2 and RT6 may be capable of protecting against the invasion of the plasmids or other foreign DNA through the CRISPR mechanism.

### Discussion

[0134] The foregoing study of the human skin microbiome associated with acne provides the first portrait of the microbiota of pilosebaceous units at the bacterial strain level. Since P. acnes is the major skin commensal bacterium found in both acne and healthy skin, this strain-level analysis is important to help understand the role of P. acnes in acne pathogenesis and in skin health. A strong association between strains of RT4 and RT5 with acne and a strong association between strains of RT6 and healthy skin, each with unique genetic elements, has been shown. Other P. acnes strains, including ribotypes 7, 8, 9, and 10, or interactions among different strains, may also contribute to the development of the disease. In addition, host factors, such as hormone level, sebum production, and physical changes in the pilosebaceous unit, may also play a role in acne pathogenesis.

[0135] The foregoing metagenomic approach in revealing the association of P. acnes strains with the disease or health is more powerful than previous studies using traditional methods (Lomholt and Kilian, 2010; McDowell et al., 2011). Because the skin microbiota of each individual and each skin site may harbor “good,” “neutral,” and “bad” strains at the same time, which may have different growth rates under in vitro culturing conditions, culturing a few isolates from a disease lesion or healthy skin site may not provide an accurate and unbiased measurement of the association of the strains with the disease or health. The sampling technique and disease associations in the foregoing study did not depend on sampling locations, on the presence of lesions in the sampling field, or on inherently biased culture techniques. While sampling lesional skin intentionally may yield interesting results, these results would not be capable of defining the disease associations that unbiased sampling can. The metagenomic approach employed in the foregoing study to identify underlying strain differences in acne may also be applied to the study of other disease/health associations with commensal or pathogenic bacteria.

### Materials and Methods

### Subjects

[0136] Subjects with acne and subjects with normal skin were recruited from various clinics in Southern California including private practice, managed care, and public hospital settings, as well as outside of dermatology clinics, to best represent the diversity of populations and history of medical care. The subject data are available at dbGaP (http://www.ncbi.nlm.nih.gov/projects/gap/cgi-bin/study.cgi?study_id=phs000263.v1.p1). The diagnosis of acne was made by board-certified dermatologists. The presence of acne was graded on a scale of 0 to 5 relating closely to the Global Acne Severity Scale (Dreno et al., 2011). Grades were recorded for both the face and the nose separately where zero represents normal skin and 5 represents the most severe inflammatory cystic acne. In acne patients, the grades of the face ranged from 1 to 5 with an average of 2.1, and the grades of the nose ranged from 0 to 2 with an average of 0.3. The presence of scarring was also noted. Subjects with normal skin were determined by board-certified dermatologists and were defined as people who had no acneiform lesions on the face, chest, or back. They were also excluded if they had other skin problems that the investigators felt would affect sampling or the microbial population on the skin. Among the 101 subjects, 59 were female (31 acne patients and 28 normal subjects) and 42 were male (18 acne patients and 24 normal subjects). The average age of the acne cohort was 22.2 and the average age of the normal cohort was 29.6. There was no significant difference in ethnicity between the acne and normal populations. The subjects responded to a written questionnaire, administered by a physician or a well-trained study coordinator who went over each question with the subjects. Most of the subjects had not been treated for acne in the past or were not being treated when samples were collected (FIG. 3). Only nine out of 78 subjects, who provided treatment information, were being treated for acne when samples were taken. Among the nine subjects, two were being treated with antibiotics, five were being treated with topical retinoids, one was being treated with both antibiotics and retinoids, and one did not list the treatment. Subjects were asked for acne treatment history in the past (anytime in their life). Eighteen out of 73 subjects, who provided treatment history, had been treated for acne in the past. Among them, seven had been treated with antibiotics, eight had been treated with retinoids, two had been treated with both antibiotics and retinoids, and one did not list the treatment. All subjects provided written informed consent. All protocols and consent forms were approved by both the UCLA and Los Angeles Biomedical Research Institute IRBs. The study was conducted in adherence to the Helsinki Guidelines.

### Samples

[0137] Skin microcomedone (white head or black head) samples were taken from the nose of the subjects using Bioré Deep Cleansing Pore Strips (Kao Brands Company, Cincinnati, Ohio) following the instruction of the manufacturer. Clean gloves were used for each sampling. After being removed from the nose, the strip was immediately placed into a 50 mL sterile tube and kept on ice or at 4° C. The cells were lysed within four hours in most of the cases.

Metagenomic DNA Extraction, 16S rDNA Amplification, Cloning, and Sequencing

[0138] Individual microcomedones were isolated from the adhesive nose strip using sterile forceps. Genomic DNA was extracted using QIAamp DNA Micro Kit (Qiagen, Valencia, Calif.). 16S rDNA was amplified and cloned according to the protocol by HMP, which is described in detail in Supplementary Information. Nearly full length sequences were obtained by Sanger method.

16S rDNA Sequence Analysis

[0139] Base calling and quality was determined with Phred (Ewing and Green, 1998; Ewing et al., 1998). Bidirectional reads were assembled and aligned to a core set of NAST-formatted sequences (rRNA16S.gold) using AmosCmp16Spipeline and NAST-ier (Haas et al., 2011). Suspected chimeras were identified using ChimeraSlayer and WigeoN (Haas et al., 2011). 16S rDNA sequences were extensively manually examined. Chromatograms were visually inspected at all bases with a Phred quality score <30. Appropriate corrections were applied. QIIME (Caporaso et al., 2010) was used to cluster the sequences into OTUs.

P. acnes Isolation and Genotyping

[0140] Colonies with the macroscopic characteristics of P. acnes were picked from each sample plate and were passed twice. The ribotype of each isolate was determined by PCR amplification and sequencing of the full length of the 16S rDNA gene by Sanger method.

### Whole Genome Shotgun Sequencing, Assembly, and Annotation

[0141] Genome HL096PA1 was sequenced using Roche/454 FLX and was assembled using a combination of PHRAP/CONSED (Gordon et al., 1998) and GSMAPPER (Roche, Branford, Conn.) with extensive manual editing in CONSED. The remaining 65 genomes were sequenced using Illumina/Solexa GAIIx (Illumina, San Diego, Calif.). Sequence datasets were processed by quality trimming and were assembled using Velvet (Zerbino and Birney, 2008). Coding sequences were predicted using GeneMark (Borodovsky and McIninch, 1993) and GLIMMER (Salzberg et al., 1998). The final gene set was processed through a suite of protein categorization tools consisting of Interpro, psort-b and KEGG. A more detailed protocol can be found at http://hmpdacc.org/doc/sops/reference_genomes/annotation/WUGC_SOP_DACC.pdf.

### Comparative Genome Analysis

[0142] Seventy-one P. acnes genome sequences were compared using Nucmer (Kurtz et al., 2004). Phylogenetic analysis was performed using MEGA5 (Tamura et al., 2007). CRISPRFinder (Grissa et al., 2007) was used to identify the CRISPR repeat-spacer sequences.

### Supplementary Information

[0143] 16S rDNA Sequence of KPA171202

[0144] All sequenced P. acnes genomes encode three copies of 16S rRNA genes, which are identical within each isolate, except KPA171202. Based on the KPA171202 genome (Bruggemann et al., 2004), one copy of the 16S rRNA gene has one nucleotide difference from the other two identical copies of RT1. However, this mutation was never observed in the 16S rDNA dataset. Multiple clones of 16S rDNA gene from KPA171202 were amplified, cloned, and sequenced and a sequence harboring this mutation was not found. Thus, KPA171202 also has three identical copies of 16S rDNA.

Comparison of P. acnes Strain Distribution to Other Human Microbiome Datasets

[0145] To determine whether the P. acnes ribotypes and their relative abundances measured in this study are unique to pilosebaceous units, a similar analysis to the microbiome 16S rDNA data from the Human Microbiome Project (HMP) and the data from Grice et al. (2009) were applied. Both datasets were obtained from healthy subjects. The relative abundance of the major ribotypes in healthy subjects from the study was largely similar to that found in these two datasets despite the fact that they were sampled from different anatomical sites (FIG. 3). RT6 (6.3%) was found to be more abundant than RT4 and RT5 combined (2.8%) in the HMP data, similar to those found in the normal cohort where RT6 represents 4.8% and RT4 and RT5 combined represent 1.2% of the clones. The same five main microbiome types were observed in the two datasets (FIG. 7).

### Genome Clustering and Phylogenetic Tree

[0146] The recA gene has been widely used to classify P. acnes strains into four known types: IA, IB, II, and III (McDowell et al., 2008; McDowell et al., 2005). The phylogenetic tree of the 71 genomes based on the SNPs in the core genome matched the recA types perfectly except one isolate, HL097PA1. Most of the genomes with ribotypes 1, 4, 5, and 532 were grouped to recA Type IA clade, which can be further divided into subclades IA-1 and IA-2. Clade IA-2 is composed of mostly RT4 and RT5. RT4 and most of RT5 genomes seem to belong to the same lineage with very similar genome sequences. All the isolates with ribotypes 3, 8, and 16, who share the mutation of T1007C in the 16S rDNA gene, were grouped to recA Type IB clade. Most of the RT3 genomes form a subclade IB-2 and RT8 genomes form a subclade by themselves, IB-1, which was highly associated with acne. Notably, RT2 and RT6, who share T854C mutation, have a more distant phylogenetic relationship to other ribotypes, and were grouped to the recA Type II clade. This is consistent with previous studies (Lomholt and Kilian, 2010; McDowell et al., 2005). P. acnes isolates with recA type III were not found in the samples.

[0147] The associations of P. acnes lineages with health and disease states were further analyzed. There was a clear shift of the association strength of the clades with acne along the phylogenetic tree (FIG. 9). The three sequenced ribotypes identified as being strongly associated with acne (RT4, RT5, and RT8) were found at one end of the tree in clades IA-2 and IB-1, while the RT6 identified as being associated with normal skin was at the other end of the tree at the tip of clade II (FIG. 9).

### Antibiotic Resistance

[0148] P. acnes ribotypes 4, 5, and 10 have a single nucleotide substitution G1058C in the 16S rDNA sequences, which has previously been shown to confer increased resistance to tetracycline (Ross et al., 1998a; Ross et al., 2001). In addition to the substitution in the 16S rDNA sequences, it was determined that all the strains of RT4 and RT5 that were sequenced have a nucleotide substitution in the 23S rDNA sequences, which confers increased resistance to a different class of antibiotics, erythromycin and clindamycin (Ross et al., 1997; Ross et al., 1998b). It was experimentally confirmed that these isolates, except two that were unculturable, were resistant to tetracycline, erythromycin, and clindamycin.

[0149] It was also examined whether the enrichment of these ribotypes in the acne group could be due to antibiotic treatment. However, in the study only a small percentage of the subjects harboring ribotypes 4, 5, or 10 were treated with antibiotics (Table S2).

TABLE S2
Past and current treatments of the subjects

| | Group | | | |
|---|---|---|---|---|
| | Acne | | Normal | |
| | Number of subjects | | | |
| | 49 | | 52 | |
| | with RT4 | without | with RT4, | without |
| | RT5, or | RT4, RT5, | RT5, or | RT4, RT5, |
| | RT10 | and RT10 | RT10 | and RT10 |
| Number of subjects in | 20 | 29 | 9 | 43 |
| each subgroup | | | | |
| Subjects reported on | 14 | 25 | 8 | 31 |
| current treatment | | | | |
| no treatment | 10 | 21 | 8 | 30 |
| antibiotics | 0 | 2 | 0 | 0 |
| retinoids | 3 | 2 | 0 | 0 |
| antibiotics and | 0 | 0 | 0 | 1 |
| retinoids | | | | |
| unknown | 1 | 0 | 0 | 0 |
| Subjects reported on | 12 | 22 | 8 | 31 |
| past treatment | | | | |
| no treatment | 5 | 16 | 6 | 28 |
| antibiotics | 2 | 4 | 0 | 1 |
| retinoids | 4 | 1 | 1 | 2 |
| antibiotics and | 1 | 0 | 1 | 0 |
| retinoids | | | | |
| unknown | 0 | 1 | 0 | 0 |

[0150] Eighteen of the 29 subjects who harbored any of these three ribotypes gave reports on both past and current treatments. Among them, 50% ( 9/18) of the subjects were never treated; 33% ( 6/18) were treated with retinoids; 11% ( 2/18) were treated with antibiotics in the past, and 5.6% ( 1/18) were treated with both antibiotics and retinoids in the past. The theory of selection by antibiotic treatment is not favored by this study. Previous surveys of antibiotic resistant strains in acne patients demonstrated that previous use of antibiotics did not always result in the presence of resistant strains and that some patients without previous use of antibiotics harbored resistant strains (Coates et al., 2002; Dreno et al., 2001). Observations in this study are consistent with previous studies.

### CRISPR Spacer Sequences

[0151] Although more similar to the GC content of P. acnes genomes, four unique spacer sequences found in strains of RT2 and RT6 have the best matches to the genome of Clostridium leptum, a commensal bacterium in the gut microbiota (Table 2). On the 55 Kb plasmid harbored in HL096PA1 and other RT4 and RT5 genomes, there is also a large cluster of 35 genes that are identical to the genes found in C. leptum, including the Tad locus.

### Materials and Methods

[0152] Metagenomic DNA Extraction, PCR Amplification, Cloning and 16S rDNA Sequencing

### Metagenomic DNA Extraction

[0153] Individual microcomedones were isolated from the adhesive nose strip using sterile forceps and placed in a 2 mL sterile microcentrifuge tube filled with ATL buffer (Qiagen) and 0.1 mm diameter glass beads (BioSpec Products, Inc., Bartlesville, Okla.). Cells were lysed using a beadbeater for 3 minutes at 4,800 rpm at room temperature. After centrifugation at 14,000 rpm for 5 minutes, the supernatant was retrieved and used for genomic DNA extraction using QIAamp DNA Micro Kit (Qiagen). The manufacturer protocol for extracting DNA from chewing gum was used. Concentration of the genomic DNA was determined by NanoDrop 1000 Spectrophotometer.

16S rDNA PCR Amplification, Cloning and Sequencing

[0154] Most of the metagenomic samples were amplified in triplicate using 16S rDNA specific primers with the following sequences: 27f-MP 5′-AGRGTTTGATCMTGGCTCAG-3′ and 1492r-MP 5′-TACGGYTACCTTGTTAYGACTT-3′. PCR reactions contained 0.5 U/μL Platinum Taq DNA Polymerase High Fidelity (Invitrogen), 1× Pre-mix E PCR buffer from Epicentre Fail-Safe PCR system, 0.12 μM concentration of each primer 27f-MP and 1492r-MP, and Sigma PCR grade water. One microliter of DNA (ranging from 0.2-10 ng total) was added to each reaction. The G-Storm GS4 thermocycler conditions were as following: initial denaturation of 96° C. for 5 minutes, and 30 cycles of denaturation at 94° C. for 30 seconds, annealing at 57° C. for 1 minute, and extension at 72° C. for 2 minutes, with a final extension at 72° C. for 7 minutes. Following amplification, an A-tailing reaction was performed by the addition of 1 U of GOTaq DNA Polymerase directly to the amplification reaction and incubation in the thermocycler at 72° C. for 10 minutes.

[0155] The three PCR amplification reactions from each source DNA were pooled and gel purified (1.2% agarose gel stained with SYBR Green fluorescent dye). The 1.4 Kb product was excised and further purified using the Qiagen QIAquick Gel Extraction kit. The purified product was cloned into OneShot E. coli cells using TOPO TA cloning kit from Invitrogen.

[0156] White colonies were picked into a 384-well tray containing terrific broth, glycerol, and kanamycin using a Qpix picking robot. Each tray was prepared for sequencing using a magnetic bead prep from Agilent and sequenced with 1/16th Big Dye Terminator from ABI. Sequencing was done with a universal forward, universal reverse, and for a subset, internal 16S rDNA primer 907R with sequences of TGTAAAACGACGGCCAGT (forward), CAGGAAACAGCTATGACC (reverse), and CCGTCAATTCCTTTRAGTTT (907R). Sequence reactions were loaded on ABI 3730 machines from ABI on 50 cm arrays with a long read run module.

[0157] A slightly different PCR and cloning protocol without automation was used for several initial samples as described below. 16S rDNA was amplified using universal primers 8F (5′-AGAGTTTGATYMTGGCTCAG-3′) and 1510R (5′-TACGGYTACCTTGTTACGACTT-3′) (Gao et al., 2007). Thermocycling conditions were as following: initial denaturation step of 5 minutes at 94° C., 30 cycles of denaturation at 94° C. for 45 seconds, annealing at 52° C. for 30 seconds and elongation at 72° C. for 90 seconds, and a final elongation step at 72° C. for 20 minutes.

[0158] PCR products were purified using DNA Clean and Concentrator Kit (Zymo Research). Subsequently, the 16S rDNA amplicons were cloned into pCR 2.1-TOPO vector (Invitrogen). One-Shot TOP-10 Chemically Competent E. coli cells (Invitrogen) were transformed with the vectors and plated on selective media. Individual positive colonies were picked and inoculated into selective LB liquid medium. After 14 hours of incubation, the plasmids were extracted and purified using PrepEase MiniSpin Plasmid Kit (USB Corporation) or Zyppy Plasmid Miniprep Kit (Zymo Research). The clones were sequenced bidirectionally using Sanger sequencing method with ⅛th chemistry using ABI 3730 sequencer (Applied Biosystems Inc.).

P. acnes Isolation and Culturing

### Sample Culture Plate

[0159] Microcomedones on the inner surface of the nose strip were mashed and scraped using a sterile loop (Fisherbrand, Pittsburgh, Pa.), and plated onto a blood agar plate (Teknova Brucella Agar Plate with Hemin and Vitamin K, Teknova, Hollister, Calif.). The plates were incubated at 37° C. for 5-7 days anaerobically using the AnaeroPack System (Mitsubishi Gas Chemical Company, Tokyo, Japan).

### Isolation and Culturing of Individual Strains

[0160] Colonies with the macroscopic characteristics of P. acnes were picked from each sample plate and were streaked onto A-media plates (Pancreatic Digase of Casine, Difco yeast extract, glucose, KH2PO4, MgSO4, Difco Agar, and water). These first-pass plates were then incubated anaerobically at 37° C. for 5-7 days. As the second pass, single isolated colonies were picked from the first-pass plates and streaked onto new A-Media plates. These plates were then incubated anaerobically at 37° C. for 5-7 days. The colonies on these plates were picked for culturing, genotyping, and genome sequencing in the subsequence steps.

Genotyping of the P. acnes Isolates

[0161] Each isolate was analyzed by PCR amplification of the 16S rDNA gene. The ribotypes were determined based on the full length sequences. Isolates with desired ribotypes were selected for future culturing and genome sequencing.

Genomic DNA Extraction of P. acnes Isolates

[0162] Isolates were grown in 5 mL of Clostridial medium under anaerobic conditions at 37° C. for 5-7 days. Cultures were pelleted by centrifugation and washed with 3 mL phosphate buffer saline (PBS). The same protocol used for the metagenomic DNA extraction was used for extracting the genomic DNA of the isolates.

### Metagenomic Shotgun Sequencing and Analysis

[0163] Metagenomic DNA samples from microcomedone samples from 22 individuals with normal skin were pooled and sequenced using Roche/454 FLX. The average read length was 236 bp. The sequencing was limited with 13,291 sequence reads. Sequence reads were aligned against the NCBI's non-redundant database using BLAST. Species assignment was based on 97% identity and 100% of the read length aligned.

Assembly, Alignment and Editing of 16S rDNA Sequences

### Assembly and Alignment

[0164] Base calling and quality were determined with Phred (Ewing and Green, 1998; Ewing et al., 1998) using default parameters. Bidirectional reads were assembled and aligned to a core set of NAST-formatted sequences (rRNA16S.gold) using AmosCmp16Spipeline and NAST-ier, which are from the Microbiome Utilities Portal of the Broad Institute (http://microbiomeutil.sourceforge.net/). These tools in turn use Amoscmp (Pop et al., 2004), Mummer (Kurtz et al., 2004), Lucy (Chou and Holmes, 2001), BLAST (Altschul et al., 1990) and CdbTools (http://compbio.dfci.harvard.edu/tgi/software/). Suspected chimeras were identified using ChimeraSlayer and WigeoN (Haas et al., 2011). Sequences with at least 90% bootstrap support for a chimeric breakpoint (ChimeraSlayer) or containing a region that varies at more than the 99% quantile of expected variation (WigeoN) were removed from further analysis.

### Quality Screening

[0165] For diversity analysis of the P. acnes population, sequences with at least 99% identity over 1,400 nucleotides to P. acnes KPA171202 (Bruggemann et al., 2004) 16S rDNA were trimmed to positions 29-1483 (numbering based on the E. coli system of nomenclature (Brosius et al., 1978)). Sequences without full coverage over this region were excluded from further strain level analysis. Chimera screening, as described above, resulted in removal of less than 0.35% of the sequences. This may be an under-estimation of the chimeras, since the majority of sequences differ by only 1 or 2 nucleotides. Low quality sequences were excluded, defined as more than 50 nucleotides between positions 79 and 1433 with Phred quality scores of less than 15. To allow detailed strain-level analysis, the data were extensively manually edited. Chromatograms were visually inspected at all bases with a Phred quality score <30, and appropriate corrections were applied. For analysis at the species level, the 16S rDNA sequences were not manually edited. Chimera screening of assembled sequences resulted in removal of less than 0.65% of the sequences. Aligned sequences were trimmed to E. coli equivalent positions 29-1483 (Brosius et al., 1978). Sequences without full coverage over this region were excluded from further analysis.

### Sequence Editing

[0166] Nearly 62,000 Sanger sequence reads representing the 26,446 assembled P. acnes sequences were mapped to the RT1 sequence in CONSED (Gordon, 2003; Gordon et al., 1998). Comprehensive semi-manual editing of the large number of sequences was made feasible by their very high pairwise similarities: a median of only one nucleotide change from RT1 per sequence (three nucleotide changes prior to editing). Editing was facilitated by the use of scripts and the custom navigation feature of CONSED allowing single click jumps to sites requiring inspection. Chromatograms were inspected for all low quality (Phred <30) bases that differed from RT1, and corrected as needed, including many commonly occurring sequence errors. In order to minimize the effect of base mis-incorporation and chimera, specific base differences from RT1 occurring in less than 4 sequences (frequency <0.00015) were considered unreliable and reverted to the corresponding RT1 base. Ribotypes were assigned for the resulting sequences based on 100% identity.

16S rDNA Sequence Analysis

### OTUs and Taxonomy Assignments

[0167] QIIME (Caporaso et al., 2010b) was used to cluster the sequences into OTUs using 99% identity cutoff, furthest neighbor, and UCLUST (Edgar, 2010). Representative sequences (most abundant) were selected and aligned using PYNAST (Caporaso et al., 2010a) to the greengenes database. Taxonomy was assigned using RDP method (Cole et al., 2009). The alignment was filtered with the lanemask provided by greengenes, and a phylogenetic tree was built using FastTree (Price et al., 2009).

### Wilcoxon Test on the Top Ten Ribotypes

[0168] For each sample, the number of clones of each of the top ten ribotypes was normalized by the total number of P. acnes clones of the sample. The normalized counts were used to test the significance in enrichment between the acne group and the normal group. The function wilcox_test in the R program (http://www.R-project.org) was used to calculate the p-values.

### Microbiome Type Assignments

[0169] Microbiome types were assigned based on the largest clades seen when samples were clustered using thetayc similarity in MOTHUR (Schloss et al., 2009) (FIGS. 5 and 6) or hierarchical clustering (Eisen at al., 1998) (FIG. 7).

### Assigning Ribotypes to Datasets of HMP and Grice et al. 2009

[0170] Sequences were assigned to a ribotype if they met the following criteria. First, there was a single best match. Second, it covered the range required to discriminate between the top 45 ribotypes (58-1388). Third, there were no Ns at discriminatory positions. Lastly, there were no more than ten non-discriminatory differences.

[0171] The HMP 16S rDNA Sanger sequence dataset was downloaded with permission from the HMP Data Analysis and Coordination Center. It has 8,492 P. acnes sequences from 14 subjects and nine body sites (retroauricular crease, anterior nares, hard palate, buccal mucosa, throat, palatine tonsils, antecubital fossa, saliva, and subgingival plaque). More details on the dataset can be found at http://www.ncbi.nlm.nih.gov/projects/gap/cgi-bin/study.cgi?study_id=phs000228.v2.p1. In this dataset, low quality bases (Phred quality <20) were converted to Ns, and 26% of the sequences were not assigned due to excessive Ns or Ns at ribotype discriminatory sites. Less than 1% was unresolved due to equal best matches or greater than ten mismatches to RT1.

[0172] The dataset from Grice et al. (2009) is available at NCBI (GenBank accession numbers GQ000001 to GQ116391). It has 22,378 P. acnes sequences from ten subjects and 21 skin sites (buttock, elbow, hypothenar palm, volar forearm, antecubital fossa, axillary vault, gluteal crease, inguinal crease, interdigital web space, nare, plantar heel, popliteal fossa, toe web space, umbilicus, alar crease, back, external auditory canal, glabella, manubrium, occiput, and retroauricular crease). Three percent of the sequences were unassigned due to greater than ten mismatches to RT1, and 1.6% was unassigned due to equal best matches.

[0173] For comparison purpose, the unedited 16S rDNA sequences were assigned to ribotypes by the same method described above and the result is shown in FIG. 3. Less than 0.6% of the sequences were unassigned due to greater than ten mismatches to RT1, and 1.7% was unassigned due to equal best matches.

Whole Genome Shotgun Sequencing, Assembly and Annotation of 66 P. acnes Isolates

### Genome HL096PA1

[0174] The genome was sequenced using Roche/454 FLX at the UCLA Genotyping and Sequencing Core. A total of 590,054 sequence reads were generated with an average read length of 230 bp. Of these, 433,896 were assembled into two contigs, a circular main chromosome of 2,494,190 by and a linear plasmid of 55,585 bp. Assembly was accomplished by a combination of PHRAP/CONSED (Gordon et al., 1998) and GSMAPPER (Roche) with extensive manual editing in CONSED. GeneMark v2.6r (Borodovsky and McIninch, 1993) and GLIMMER v2.0 (Salzberg et al., 1998) were used to performed ab initio protein coding gene prediction. tRNAScan-SE 1.23 was used for tRNA identification and RNAmmer was used for predicting ribosomal RNA genes (5S, 16S, and 23S). Genome annotation results were based on automated searches in public databases, including Pfam (http://pfam.jouy.inra.fr/), KEGG (http://www.genome.jp/kegg), and COG (http://www.ncbi.nlm.nih.gov/COG/). Manual inspection of the annotation was also performed.

### Genomes of the Other 65 Isolates

[0175] The genomes were sequenced using Illumina/Solexa Genome Analyzer IIx and annotated by the Genome Center of Washington University at St. Louis.

### Assembly

[0176] Each genomic DNA sample was randomly sheared and an indexed library was constructed using standard Illumina protocols. Twelve uniquely tagged libraries were pooled and run on one lane of a GAIIx flowcell and paired end sequences were generated. Following deconvolution of the tagged reads into the separate samples, datasets were processed using BWA (L1 and Durbin, 2009) quality trimming at a q10 threshold. Reads trimmed to less than 35 bp in length were discarded and the remaining reads were assembled using oneButtonVelvet, an optimizer program that runs the Velvet assembler (Zerbino and Birney, 2008) numerous times over a user supplied k-mer range while varying several of the assembler parameters and optimizing for the assembly parameter set which yields the longest N50 contig length.

### Annotation

[0177] Coding sequences were predicted using GeneMark v3.3 (Borodovsky and McIninch, 1993) and GLIMMER v2.13 (Salzberg et al., 1998). Intergenic regions not spanned by GeneMark and GLIMMER were aligned using BLAST against NCBI's non-redundant database and predictions were generated based on protein alignments. tRNA genes were determined using tRNAscan-SE 1.23 and non-coding RNA genes were determined by RNAmmer-1.2 and Rfam v8.0. The final gene set was processed through a suite of protein categorization tools consisting of Interpro, psort-b and KEGG. The gene product naming comes from the BER pipeline (JCVI). A more detailed standard operating protocol (SOP) can be found at http://hmpdacc.org/doc/sops/reference_genomes/annotation/WUGC_SOP_DACC.pdf.

71 P. acnes Genome Analysis and Comparison
Identification of the Core Regions of P. acnes Genomes

[0178] The “core” regions were defined as genome sequences that are present in all 71 genomes. P. acnes KPA171202 was used as the reference genome. Each of the other 70 genome sequences (a series of contigs in most of the genomes and two complete genomes) was mapped to the reference genome using Nucmer (Kurtz et al., 2004). All the 70 “.coords” output files of Nucmer program were analyzed to identify overlap regions based on the KPA171202 coordinates using a Perl script. Finally, “core” sequences were extracted based on the genome sequence of KPA171202 with the coordinates calculated above. On average, 90% (ranging from 88% to 92%) of the genomes were included in the core regions.

### Identification of SNPs in the Core Regions

[0179] Single nucleotide polymorphisms (SNPs) were identified by using “show-snps” utility option of the Nucmer program (Kurtz et al., 2004) with the default settings. Genome sequence of P. acnes KPA171202 was used as the reference genome. All the 70 “.snps” output files of Nucmer program were analyzed to identify unique SNP positions based on the KPA171202 coordinates using a Perl script. The SNPs in the core regions were further analyzed to construct a phylogenetic tree.

### Phylogenetic Tree Construction

[0180] The 71 concatenated sequences of the 96,887 SNP nucleotides in the core regions were used to construct a phylogenetic tree of the P. acnes genomes. The evolutionary distance of the core regions among the genomes was inferred using the Neighbor-Joining method (Saitou and Nei, 1987). The bootstrap tree inferred from 1,000 replicates was taken. Branches corresponding to partitions reproduced in less than 80% bootstrap replicates were collapsed. FIG. 8 shows only the topology. In FIG. 9, the tree was drawn to scale, with branch lengths in the same units as those of the evolutionary distances used to infer the phylogenetic tree. The evolutionary distances were computed using the p-distance method and are in the units of the number of nucleotide differences per site. This tree shows the comparison based on only the core regions. The distance does not represent the true evolutionary distance between different genomes, since the non-core regions of each genome were not considered here. All positions containing gaps and missing data were eliminated. Evolutionary analysis was conducted using MEGA5 (Tamura et al., 2007).

### Gene Content Comparison

[0181] In order to assess the conservation of gene content across the 71 genomes, protein coding genes in all the genomes were clustered using UCLUST (Edgar, 2010) by first sorting by decreasing length then clustering each sequence to an existing seed sequence if it had at least 90% nucleotide identity over its entire length, otherwise it became a new seed. For visualization, the data were reformatted to columns and rows representing genes and genomes, respectively. One or more copies of the genes in a genome were treated as present. Gene columns were sorted by their position based on the coordinates of the HL096PA1 genome, a fully finished genome with a 55 Kb plasmid. Genome rows were sorted by their positions in the SNP-based Neighbor Joining tree described above.

### Identification of CRISPR/Cas

[0182] CRISPRFinder (Grissa et al., 2007) was used to identify the CRISPR repeat-spacer sequences. The annotation of HL110PA3 was used for BLAST alignment in order to identify the presence of CRISPR/Cas structure and CRISPR repeat-spacer sequences in strains of HL001PA1, HL060PA1, HL082PA2, HL103PA1, HL106PA1, HL110PA4 and J139. Each spacer sequence was annotated by BLAST alignment against NCBI's non-redundant nucleotide database and the reference genomic sequences database (refseq_genomic).

### Sequence Coverage Analysis

[0183] MAQ (Li et al., 2008) was used to map the raw sequence reads from Illumina/Roche platform to the reference genomes. Briefly, “map” command was used for mapping, and “assemble” command was used for calling the consensus sequences from read mapping, then “cnd2win” command was used to extract information averaged in a tilling window. A window size of 1,000 by was used. Randomly selected 1 million reads were used for mapping. This accounted for approximately 40× coverage for all the genomes except HL096PA2, HL096PA3, HL097PA1 and HL099PA1, which had approximately 55× to 75× coverage. BWA (L1 and Durbin, 2010) was used to map the raw sequence reads from Roche/454 platform to the reference genome HL096PA1. The average coverage was calculated in 1,000 by window.

### Quantitative PCR

[0184] Quantitative PCR (qPCR) targeting TadA on the plasmid (Locus 3) and housekeeping genes Pak and RecA on the chromosome was performed using the genomic DNA extracted from the P. acnes isolates. LightCyler 480 High Resolution Melting Master kit was used (Roche Diagnostics GmbH, Mannheim, Germany). Each 10 μL reaction solution was consisted of 5 μL master mix (2× concentrate), 1 μL 25 mM MgCl2, 0.5 μL 4 μM forward and reverse primers, and DNA template. Four qPCR runs were performed on Roche LightCycler 480. Primer sequences for TadA are 5′-GATAATCCGTTCGACAAGCTG-3′ (forward) and 5′-ACCCACCACGATGATGTTT-3′ (reverse). Primer sequences for pak are 5′-CGACGCCTCCAATAACTTCC-3′ (forward) and 5′-GTCGGCCTCCTCAGCATC-3′ (reverse). Primer sequences for recA are 5′-CCGGAGACAACGACAGGT-3′ (forward) and 5′-GCTTCCTCATACCACTGGTCATC-3′ (reverse). All samples were run in duplicates in each qPCR run, except the second run, which was not duplicated. Thermocycling conditions were as following: initial activation step of 10 minutes at 95° C.; 50 amplification cycles with each consisting of 10 seconds at 95° C., 15 seconds at 65° C. in the first cycle with a stepwise 0.5° C. decrease for each succeeding cycle, and 30 seconds at 72° C.; and final melting curve step starting at 65° C. and ending at 99° C. with a ramp rate of 0.02° C./s and acquisition rate of 25° C. DNA concentration standards were run in duplicates. Copy number ratios of genes were calculated based on the concentrations of the genes on the plasmid and chromosome.

### Data Availability

[0185] 16S rDNA sequences have been deposited at GenBank under the project ID 46327. Whole genome shotgun sequences and annotations of the P. acnes strains have been deposited at GenBank under the accession numbers ADWB00000000, ADWC00000000, ADWF00000000, ADWH00000000, ADWI00000000, ADXP00000000, ADXQ00000000, ADXR00000000, ADXS00000000, ADXT00000000, ADXU00000000, ADXW00000000, ADXX00000000, ADXY00000000, ADXZ00000000, ADYA00000000, ADYB00000000, ADYC00000000, ADYD00000000, ADYE00000000, ADYF00000000, ADYG00000000, ADYI00000000, ADYJ00000000, ADYK00000000, ADYL00000000, ADYM00000000, ADYN00000000, ADY000000000, ADYP00000000, ADYQ00000000, ADYR00000000, ADYS00000000, ADYT00000000, ADY000000000, ADYV00000000, ADYW00000000, ADYX00000000, ADYY00000000, ADYZ00000000, ADZA00000000, ADZB00000000, ADZC00000000, ADZD00000000, ADZE00000000, ADZF00000000, ADZG00000000, ADZH00000000, ADZI00000000, ADZJ00000000, ADZK00000000, ADZL00000000, ADZM00000000, ADZN00000000, ADZO00000000, ADZP00000000, ADZQ00000000, ADZR00000000, ADZS00000000, ADZT00000000, ADZV00000000, ADZW00000000, CP003293, and CP003294.

### Example 2

### Pan-Genome and Comparative Genome Analysis of Propionibacterium acnes

[0186] Propionibacterium acnes is a major human skin bacterium. To understand whether different strains have different virulent properties and thus play different roles in health and diseases, the genomes of 82 P. acnes strains, most of which were isolated from acne or healthy skin, were compared. Lineage-specific genetic elements were identified that may explain the phenotypic and functional differences of P. acnes as a commensal in health and as a pathogen in diseases. By analyzing a large number of sequenced strains, an improved understanding of the genetic landscape and diversity of the organism at the strain level and at the molecular level is provided.

### Introduction

[0187] Propionibacterium acnes is a major commensal of the human skin. It contributes to maintaining the skin health by inhibiting the invasion of common pathogens, such as Staphylococcus aureus and Streptococcus pyogenes. It does so by hydrolyzing triglycerides and releasing free fatty acid that contributes to the acidic pH of the skin surface (1). On the other hand, P. acnes has been historically linked to acne vulgaris, a chronic inflammatory disease of the pilosebaceous unit affecting more than 85% of adolescents and young adults (2). A metagenomic study previously demonstrated that P. acnes was a dominant bacterium in the pilosebaceous unit in both healthy individuals and acne patients (3, 4). At the strain level, however, the population structures of P. acnes were different between the two groups. These findings suggested that microbe-related human diseases are often caused by certain strains of a species rather than the entire species, in line with the studies of other diseases (5, 6).

[0188] P. acnes has been classified into three distinct types. Studies by Johnson and Cummins (7) first revealed two distinct phenotypes of P. acnes, known as types I and II, that could be distinguished based on serological agglutination tests and cell wall sugar analysis. McDowell et al. (8) differentiated types I and II P. acnes by monoclonal antibody typing. Furthermore, their phylogenetic analysis of P. acnes strains based on the nucleotide sequences of the recA gene and a more variable hemolysin/cytotoxin gene (tly) demonstrated that types I and II represent distinct lineages. Their investigations also revealed that strains within the type I lineage could be further split into two clades, known as types IA and IB (8, 9). An additional phylogenetic group of P. acnes, known as type III was described later (10). Recent studies based on multilocus sequence typing (MLST) further sub-divided P. acnes into closely related clusters, some of which were associated with various diseases including acne (11-13).

[0189] The first complete genome sequence of P. acnes, KPA171202, a type IB strain, provided insights on the pathogenic potential of this Gram-positive bacterium (14). The genome is 2.56 M by with 60% of GC content. It encodes 2,333 open reading frames (ORFs) including multiple gene products involved in degrading host molecules, such as sialidases, neuraminidases, endoglycoceramidases, lipases, and pore-forming factors. However, the sequence of a single genome does not reflect the genetic landscape of the organism and how genetic variations among strains determine their various phenotypes and pathogenic properties.

[0190] To better understand the human microbiome variations at the strain level, as part of the Human Microbiome project (HMP) (15, 16), previously generated were the reference genome sequences of 66 P. acnes strains selected from a collection of over 1,000 strains isolated from a cohort of healthy subjects and acne patients (4). These 66 strains represent the major lineages of P. acnes found on the human skin, including types IA, IB, and II. To cover all the main P. acnes lineages in the analysis, three additional P. acnes strains were sequenced, including the first available type III P. acnes genome. Thirteen P. acnes genomes sequenced by other research groups (14, 17-22) were also available at the time of analysis. With a total of 82 genomes, performed was a comparative genome analysis to characterize the pan-genome of P. acnes, the phylogenetic relationships among different lineages, the microevolution of the strains in the same individual microbiome, and the genetic elements specific to each lineage and their associations with health and disease.

### Results

[0191] P. acnes Strains and General Genome Features

[0192] To understand the genomic diversity of this important skin commensal at the strain level, the genomes of 69 sequenced P. acnes strains were analyzed. Among them, 67 P. acnes strains were isolated from the skin of healthy individuals and acne patients (3, 4), and two P. acnes strains, HL201 PA1 and HL202PA1, were isolated from refractory endodontic lesions (23) (Table 2-1).

TABLE 2-1
General features of the 82 P. acnes genomes

| | | | | | Sequencing | Genome | | Number |
|---|---|---|---|---|---|---|---|---|
| Genome | Strain name | Origin | Ribotype | recA type | method | size (Mb) | GC % | of ORFs |
| 1 | HL001PA1 | Skin | 2 | II | Illumina | 2.49 | 60.0 | 2,661 |
| 2 | HL002PA1 | Skin | 3 | IB | Illumina | 2.48 | 60.1 | 2,549 |
| 3 | HL002PA2 | Skin | 1 | IA | Illumina | 2.48 | 60.1 | 2,594 |
| 4 | HL002PA3 | Skin | 1 | IA | Illumina | 2.48 | 60.1 | 2,565 |
| 5 | HL005PA1 | Skin | 4 | IA | Illumina | 2.53 | 60.2 | 2,724 |
| 6 | HL005PA2 | Skin | 1 | IA | Illumina | 2.48 | 60.0 | 2,645 |
| 7 | HL005PA3 | Skin | 1 | IA | Illumina | 2.48 | 60.1 | 2,579 |
| 8 | HL005PA4 | Skin | 3 | IB | Illumina | 2.47 | 60.0 | 2,607 |
| 9 | HL007PA1 | Skin | 4 | IA | Illumina | 2.53 | 60.2 | 2,691 |
| 10 | HL013PA1 | Skin | 3 | IB | Illumina | 2.48 | 60.0 | 2,618 |
| 11 | HL013PA2 | Skin | 1 | IA | Illumina | 2.48 | 60.1 | 2,588 |
| 12 | HL020PA1 | Skin | 1 | IA | Illumina | 2.48 | 60.1 | 2,554 |
| 13 | HL025PA1 | Skin | 1 | IB | Illumina | 2.54 | 60.1 | 2,581 |
| 14 | HL025PA2 | Skin | 3 | IB | Illumina | 2.48 | 60.0 | 2,616 |
| 15 | HL027PA1 | Skin | 3 | IB | Illumina | 2.53 | 60.1 | 2,711 |
| 16 | HL027PA2 | Skin | 1 | IA | Illumina | 2.48 | 60.1 | 2,629 |
| 17 | HL030PA1 | Skin | 1 | IB | Illumina | 2.54 | 60.0 | 2,662 |
| 18 | HL030PA2 | Skin | 3 | IB | Illumina | 2.51 | 60.1 | 2,647 |
| 19 | HL036PA1 | Skin | 532 | IA | Illumina | 2.48 | 60.1 | 2,575 |
| 20 | HL036PA2 | Skin | 532 | IA | Illumina | 2.48 | 60.1 | 2,565 |
| 21 | HL036PA3 | Skin | 1 | IA | Illumina | 2.48 | 60.1 | 2,601 |
| 22 | HL037PA1 | Skin | 3 | IB | Illumina | 2.48 | 60.1 | 2,617 |
| 23 | HL038PA1 | Skin | 4 | IA | Illumina | 2.54 | 60.2 | 2,663 |
| 24 | HL042PA3 | Skin | 6 | II | Roche/454 | 2.53 | 60.1 | 2,610 |
| 25 | HL043PA1 | Skin | 5 | IA | Illumina | 2.53 | 60.2 | 2,698 |
| 26 | HL043PA2 | Skin | 5 | IA | Illumina | 2.53 | 60.2 | 2,688 |
| 27 | HL045PA1 | Skin | 4 | IA | Illumina | 2.53 | 60.2 | 2,692 |
| 28 | HL046PA1 | Skin | 3 | IB | Illumina | 2.48 | 60.0 | 2,599 |
| 29 | HL046PA2 | Skin | 1 | IA | Illumina | 2.53 | 60.1 | 2,692 |
| 30 | HL050PA1 | Skin | 3 | IB | Illumina | 2.48 | 60.0 | 2,652 |
| 31 | HL050PA2 | Skin | 1 | II | Illumina | 2.46 | 60.1 | 2,581 |
| 32 | HL050PA3 | Skin | 3 | IB | Illumina | 2.48 | 60.0 | 2,558 |
| 33 | HL053PA1 | Skin | 4 | IA | Illumina | 2.53 | 60.2 | 2,632 |
| 34 | HL053PA2 | Skin | 8 | IB | Illumina | 2.51 | 60.1 | 2,664 |
| 35 | HL056PA1 | Skin | 4 | IA | Illumina | 2.48 | 60.1 | 2,581 |
| 36 | HL059PA1 | Skin | 16 | IB | Illumina | 2.48 | 60.1 | 2,570 |
| 37 | HL059PA2 | Skin | 16 | IB | Illumina | 2.48 | 60.0 | 2,535 |
| 38 | HL060PA1 | Skin | 2 | II | Illumina | 2.48 | 60.1 | 2,601 |
| 39 | HL063PA1 | Skin | 1 | IA | Illumina | 2.40 | 60.1 | 2,520 |
| 40 | HL063PA2 | Skin | 3 | IB | Illumina | 2.53 | 60.0 | 2,669 |
| 41 | HL067PA1 | Skin | 3 | IB | Illumina | 2.53 | 60.1 | 2,633 |
| 42 | HL072PA1 | Skin | 5 | IA | Illumina | 2.53 | 60.1 | 2,594 |
| 43 | HL072PA2 | Skin | 5 | IA | Illumina | 2.53 | 60.1 | 2,672 |
| 44 | HL074PA1 | Skin | 4 | IA | Illumina | 2.53 | 60.2 | 2,723 |
| 45 | HL078PA1 | Skin | 1 | IA | Illumina | 2.58 | 60.1 | 2,785 |
| 46 | HL082PA1 | Skin | 8 | IB | Illumina | 2.50 | 60.1 | 2,648 |
| 47 | HL082PA2 | Skin | 2 | II | Illumina | 2.51 | 60.0 | 2,644 |
| 48 | HL083PA1 | Skin | 1 | IA | Illumina | 2.48 | 60.1 | 2,575 |
| 49 | HL083PA2 | Skin | 3 | IB | Illumina | 2.48 | 60.0 | 2,633 |
| 50 | HL086PA1 | Skin | 8 | IB | Illumina | 2.53 | 60.1 | 2,610 |
| 51 | HL087PA1 | Skin | 3 | IB | Illumina | 2.48 | 60.1 | 2,584 |
| 52 | HL087PA2 | Skin | 1 | IA | Illumina | 2.48 | 60.1 | 2,572 |
| 53 | HL087PA3 | Skin | 3 | IB | Illumina | 2.52 | 60.1 | 2,619 |
| 54 | HL092PA1 | Skin | 8 | IB | Illumina | 2.50 | 60.1 | 2,590 |
| 55 | HL096PA1 | Skin | 5 | IA | Roche/454 | 2.49 | 60.0 | 2,393 |
| 56 | HL096PA2 | Skin | 5 | IA | Illumina | 2.56 | 60.1 | 2,638 |
| 57 | HL096PA3 | Skin | 1 | IA | Illumina | 2.58 | 60.0 | 2,651 |
| 58 | HL097PA1 | Skin | 5 | IC | Illumina | 2.52 | 60.2 | 2,617 |
| 59 | HL099PA1 | Skin | 4 | IA | Illumina | 2.58 | 60.1 | 2,735 |
| 60 | HL100PA1 | Skin | 1 | IA | Illumina | 2.48 | 60.1 | 2,562 |
| 61 | HL103PA1 | Skin | 2 | II | Illumina | 2.48 | 60.1 | 2,546 |
| 62 | HL106PA1 | Skin | 2 | II | Illumina | 2.48 | 60.1 | 2,533 |
| 63 | HL106PA2 | Skin | 1 | IA | Illumina | 2.48 | 60.1 | 2,567 |
| 64 | HL110PA1 | Skin | 8 | IB | Illumina | 2.51 | 60.1 | 2,667 |
| 65 | HL110PA2 | Skin | 8 | IB | Illumina | 2.50 | 60.1 | 2,614 |
| 66 | HL110PA3 | Skin | 6 | II | Illumina | 2.54 | 60.1 | 2,806 |
| 67 | HL110PA4 | Skin | 6 | II | Illumina | 2.54 | 60.1 | 2,724 |
| 68 | HL201PA1 | Refractory | 6 | III | Illumina | 2.48 | 60.1 | 2,629 |
| | | endodontic | | | | | | |
| | | lesion | | | | | | |
| 69 | HL202PA1 | Refractory | Not | II | Illumina | 2.56 | 60.0 | 2,821 |
| | | endodontic | assigned | | | | | |
| | | lesion | | | | | | |
| 70 | KPA171202 | Plate | 1 | IB | Sanger | 2.56 | 60.0 | 2,297 |
| 71 | J139 | Skin | 2 | II | Roche/454 | 2.48 | 60.0 | 2,364 |
| 72 | J165 | Skin | 1 | IA | Roche/454 | 2.50 | 60.0 | 2,403 |
| 73 | SK137 | Skin | 1 | IA | Roche/454 | 2.50 | 60.0 | 2,352 |
| 74 | SK187 | Skin | 3 | IB | Roche/454 | 2.51 | 59.0 | 2,381 |
| 75 | SK182 | Skin | 1 | IA | Roche/454 | 2.48 | 60.0 | 2,338 |
| 76 | 266 | Pleuropulmonary | 1 | IA | Roche/454 | 2.50 | 60.0 | 2,412 |
| | | Infection | | | | | | |
| 77 | 6609 | Skin | 1 | IB | Solid | 2.56 | 60.0 | 2,358 |
| 78 | ATCC11828 | Abscess | 2 | II | Solid | 2.49 | 60.0 | 2,260 |
| 79 | P.acn17 | Corneal scrape | 3 | IB | Solid | 2.62 | 60.0 | 2,266 |
| 80 | P.acn31 | Aqueous humour | 3 | IB | Solid | 2.50 | 60.0 | 2,247 |
| 81 | P.acn33 | Aqueous humour | 3 | IB | Solid | 2.49 | 60.0 | 2,236 |
| 82 | PRP-38 | Skin | 5 | IC | Solid | 2.51 | 60.0 | 2,233 |

[0193] These 69 strains cover all the known P. acnes lineages isolated to date. The strains were classified based on their 16S ribosomal RNA (rRNA) sequences. Each unique 16S rRNA sequence was defined as a ribotype (RT). All the sequenced P. acnes genomes had three identical copies of 16S rRNA. Based on the metagenomic study of the skin microbiome associated with acne (4), among the top ten major ribotypes, RT1, RT2, and RT3 were the most abundant and found in both healthy individuals and acne patients with no significant differences. RT4, RT5, and RT8, however, were enriched in acne patients, while RT6 was mostly found in healthy individuals. The 69 strains included 19 RT1 strains, five RT2 strains, 15 RT3 strains, eight RT4 strains, seven RT5 strains, four RT6 strains, six RT8 strains, four strains of minor ribotypes, and one type III strain. The average genome size was 2.50 Mb (ranging from 2.46 to 2.58 Mb) and the GC content was 60%. On average, each genome encoded 2,626 ORFs (ranging from 2,393 to 2,806) (Table 2-1).

[0194] The analysis included 13 additional P. acnes genomes that were publicly available (14, 17-22) (Table 2-1). The average genome size of these 13 P. acnes strains was 2.51 Mb (ranging from 2.48 to 2.56 Mb) and the GC content was 60%, encoding 2,319 ORFs on average (ranging from 2,233 to 2,412). These 13 genomes include six RT1 strains, two RT2 strains, four RT3 strains, and one RT5 strain, however, no genomes of RT4, RT6, RT8 and type III strains were available. The sequencing effort significantly increased the number of genomes for each P. acnes lineage as well as the number of lineages covered.

P. acnes Pan-Genome

[0195] To determine the genetic landscape of P. acnes, the pan-genome based on the 82 P. acnes genomes was estimated. The number of new genes that would be discovered by sequencing additional P. acnes genomes by using a power law regression analysis, n=κNγ (24), was estimated (FIG. 13). The analysis identified that α was 0.788. The average number of new genes added by a novel genome was three when the 82nd genome was added. The number of P. acnes pan-genes that would be accumulated by sequencing additional P. acnes genomes by using a power law regression analysis, n=κNγ, was then estimated (FIG. 14). The exponent γ was 0.067, and P. acnes had 3,136 pan-genes (N=82). Based on these results, the pan-genome of P. acnes is defined as open, as the exponent a was less than one and γ was greater than zero (24). However, since a was close to one and γ was close to zero, it is believed that this organism evolved tightly without large expansions.

Phylogenetic Relationships Among the P. acnes Genomes

[0196] A genome comparison of the 82 P. acnes strains revealed that 2.20 Mb (88% of the average genome) was shared by all the P. acnes genomes, which are referred to herein as the “core regions.” Within the core regions, 123,223 unique single nucleotide polymorphisms (SNPs) were detected among the strains. Twenty seven percent of the SNPs were unique to type I, 22% were unique to type II, and 22% were unique to type III (FIG. 15). A phylogenetic tree based on the 123,223 SNPs in the core regions was constructed (FIG. 16). The tree showed that the recA type classification of the strains was consistent with the major clades based on the genomes. The recA type IA, IB, and II strains were all clustered together within each type, respectively, except HL097PA1 and PRP-38. The only recA type III strain, HL201 PA1, formed a separate branch from type I and type II strains. The tree also showed that the 16S rRNA ribotypes of the strains were consistent with the phylogenetic relationships inferred from the genome sequences. Most of the RT1 strains were clustered in clade IA-1, while all the RT4 and most of the RT5 strains were clustered in clade IA-2. All six RT8 strains were clustered together in clade IB-1. All the RT3 and RT16 strains were clustered together in clade IB-2 except SK187. HL030PA1 and KPA171202 were clustered together with 6609, as a distinct IB-3 clade. HL097PA1 and PRP-38 were clustered together and were classified as a novel type IC recently named by McDowell et al. (22). All the RT2 strains were clustered in clade II, distant from clade I, together with RT6 strains. HL202PA1, which is a RT6 strain and was isolated from an oral site, was not much different from the skin RT6 isolates and was clustered together. The sequence types of all the strains were assigned based on two published MLST schemes (11,13) and are shown in Table S1. The phylogenetic tree based on the core genome regions demonstrated that 16S ribotyping can be used for P. acnes strain identification and classification. It provides a much higher resolution than recA typing, and in the meantime, it is much simpler and faster with only one gene required than MLST, which is a laborious process generally requiring 7-9 genes.

[0197] The large number of genome sequences that were generated permitted analyzing the P. acnes pan-genome at the clade level. Clades IA, IB and II had 36, 33 and 12 genomes, respectively. Based on the power law regression analyses described above, it was determined that at the clade level P. acnes also has an open pan-genome for recA type IA clade, type IB clade and type II clade with limited expansions (FIG. 17). The expansion rates were not significantly different among the clades and were similar to the one at the species level. This suggests that all the major lineages of P. acnes had evolved at a similar rate.

### SNP Distribution in the Core Genome Regions

[0198] To understand whether there are “hot spots” for mutation and/or recombination in the P. acnes genomes, it was determined whether the SNPs were randomly distributed throughout the genomes or were enriched in particular regions. The frequency of SNPs in each protein coding gene in the core regions was calculated. The average rate of polymorphic sites in the core regions was 5.3%, i.e., 5.3 unique SNPs in every 100 bp. This rate is comparable to the ones found in multiple gut bacterial genomes (25). Among the 1,888 genes encoded in the core regions, 55 genes had higher SNP frequencies with more than two standard deviations (SD), and 47 genes with more than three SD (FIG. 18a). Using the Kolmogorov-Smirnov (K-S) test, it was demonstrated that these 102 highly mutated genes were not randomly distributed throughout the genome (P<0.01) (FIG. 18b). This suggests that P. acnes has an evolutionary risk management strategy. Based on the Clusters of Orthologous Groups (COG) categories, the functions of these 102 genes showed a similar distribution as those of all 1,888 genes in the core regions. There was no enrichment of a particular functional category in these frequently mutated genes.

[0199] It was further determined whether the mutations in the core regions were under selection by calculating the ratio of non-synonymous (NS) vs. synonymous (S) SNPs for the 1,888 genes. The average rate of NS mutations was 38%. Among the 1,888 genes, 54 genes had higher NS mutation rates with more than two SD and 13 genes with more than three SD (FIG. 18c). These 67 genes were randomly distributed in the genome and not particularly enriched in certain regions (P>0.05 with the K-S test) (FIG. 18d). Most of the 102 genes with higher SNP frequencies did not overlap with these 67 genes, suggesting that independent evolutionary events might lead to these gene alternations. Only ten genes had both high SNP frequencies and high NS mutation rates, all annotated as hypothetical proteins.

Evolutionary Relationships of the Strains Isolated from the Same Individuals

[0200] The large number of P. acnes strains isolated from the cohort of acne patients and healthy individuals allowed the investigation of whether the P. acnes strains in hair follicles from the same individual were clonal. Based on previous metagenomic analysis, it was demonstrated that most individuals harbored multiple P. acnes strains from different lineages (4). However, it was not known whether the strains of the same lineage in the same individual were derived from the same ancestor. Genome sequences of the strains isolated from the same samples makes it possible to examine whether the Strains from the Same Individuals (SSIs) evolved from the same origin via clonal expansion. The 69 sequenced P. acnes strains included 49 SSIs: 13 duets (i.e., 13 pairs of strains isolated from 13 individuals), five trios, and two quartets. Twenty three SSIs were clustered in the same clades, nine in clade IA-1, four in clade IA-2, two in clade IB-1, six in clade IB-2 and two in clade II. The distance (substitution rate at the 123,223 SNP sites in the core regions) between each pair of SSIs was calculated (FIG. 16). The average distance of the SSIs in clade IA-1 was 0.0014, while that of strains from different individuals in clade IA-1 was 0.0064 (P<0.001). Consistent results were observed in other clades including IA-2, IB-1, IB-2, and II (FIG. 19a). This demonstrated that the SSIs in the same lineage were significantly more similar to each other than the strains isolated from different individuals, suggesting that they were clonal in each individual. Among the RT4 and RT5 strains within clade IA-2, however, the average distance between SSIs (0.0004) was not significantly different from the average distance between strains from different individuals (0.0017) (P=0.072). Moreover, the average distance between RT4/RT5 strains from different individuals (0.0017) was similar to the average distance between the SSIs in clade IA-1 (0.0014), and even shorter than the average distances between the SSIs in clades IB-1 (0.0059), IB-2 (0.0019) and II (0.0022) (FIG. S3A). This suggests that although isolated from different individuals, these RT4 and RT5 strains seemed to be clonal and had evolved from the same recent ancestor. A similar relationship between the two RT5 strains in clade IC were observed, where HL097PA1 and PRP-38, isolated from different individuals, were closely related to each other with a distance of 0.0012. The metagenomic study has demonstrated a strong association of strains of RT4 and RT5 with acne (4). The clonality of these strains isolated from different individuals suggests that RT4 and RT5 strains may be transmitted among individuals. This finding is consistent with the previous clinical report that antibiotic-resistant Propionibacteria were transmissible between acne-prone individuals including dermatologists (26), as most of the antibiotic-resistant P. acnes strains belong to RT4 and RT5 (4,13). The analysis of SSIs further supports the theory that RT4 and RT5 strains may be a pathogenic factor in acne.

[0201] To determine whether the distances between strain pairs from the same individuals but belonging to different lineages were different from random strain pairs, the distances of any pair of SSIs from different clades were calculated. The average distance of the SSIs between clades IA-1 and IA-2 HL005PA3 vs. HL005PA1, HL005PA2 vs. HL005PA1, HL096PA3 vs. HL096PA1, and HL096PA3 vs. HL096PA2) was 0.039, similar to that of the isolates from different individuals (0.040). Similar results were obtained for all other clade pair comparisons (FIG. 19b). These results demonstrated that the SSIs from different clades were similarly different from each other as to the strains from different individuals. This analysis suggests that in each individual microbiome P. acnes strains undergo clonal expansion in the same population, while multiple strain populations can often co-exist in the same community with little recombination.

### Non-Core Genome Regions in Type I Strains

[0202] By comparing the genome sequences of the 82 P. acnes strains, non-core genome regions were identified that were not shared by all 82 strains. The total length of the non-core regions was approximately 0.90 Mb. The average GC content of the non-core regions was slightly lower than that of the core regions, 58%±6.9%, suggesting that part of the non-core regions might be originated from other species via horizontal gene transfer.

[0203] Different lineages of P. acnes strains have distinct non-core regions. Using hierarchical clustering of the non-core regions, it was shown that the strains of the same ribotypes were clustered together with distinct separations among the clades (FIG. 20). Among the non-core regions, the genetic elements specific to each lineage were identified, which may explain the phenotypic and functional differences of the strains in health and disease. In clade IA-2, genomic loci 1, 2 and 3 were identified, which were unique to mainly the RT4 and RT5 strains (4). These loci appear to be originated from mobile elements, encode several virulent genes, and may contribute to the virulence of these strains. In the meantime, the genomic island-like cluster 2 (GI2) (18) was uniquely absent in most of the strains in this clade. Clade IB-1 consisted of all RT8 strains, which were also highly associated with acne based on our metagenomic study (4). They all have a unique genomic island (locus 4), which is 20 Kb long and encodes a series of nonribosomal peptide synthetases (NRPS), which may contribute to increased virulence of these strains. Most RT3 and RT16 strains belong to clade IB-2 and have fewer non-core regions than the strains in other clades. This may be explained by the lack of entire rearrangement hot spot (RHS) family proteins, which function in genomic rearrangements as previously implicated in Escherichia coli (27). Clade IB-3 consisted of three strains, including KPA171202. Three of the four genomic islands described previously (18), GI1, GI3 and GI4, were unique to this clade and were absent in all other strains. This analysis suggests that KPA171202, although was the first sequenced complete genome of P. acnes, did not seem to be a common skin P. acnes strain representing one of the major lineages. This result is consistent with previous studies using MLST (11-13). Strains of clade IC belong to RT5. They also contain locus 3, a linear plasmid, which is highly homologous to the locus 3 in the RT4 and RT5 strains of clade IA-2 and encodes a tight adhesion locus originated from Clostridium leptum (4). In general, although strains in different lineages had a similar genome size with similar gain and loss of genetic materials, they harbor distinct genetic elements which may give rise to their different virulent properties.

### Non-Core Genome Regions in Type II Strains

[0204] Strains in clade II, mainly RT2 and RT6, were more distantly related to the strains in clade I. Based on the metagenomic study, strains in clade II were not associated with acne, as RT2 was evenly distributed between acne patients and healthy individuals, while RT6 was significantly enriched in healthy individuals (4). Compared to type I strains, the genomes of RT2 and RT6 strains lack several regions, which are approximately 92 Kb long in total and encode 107 ORFs. RT2 and RT6 genomes have additional genomic regions with a similar size encoding 93 ORFs (FIG. 20). Based on the COG classification, there were no significant differences in the distribution of the functional categories between the 107 type I specific ORFs and 93 type II specific ORFs.

[0205] The most unique genomic feature of RT2 and RT6 strains is represented by the clustered regularly interspaced short palindromic repeats (CRISPR)/Cas locus (4). CRISPR/Cas system provides acquired bacterial immunity against viruses and plasmids by targeting nucleic acids in a sequence-specific manner (28). All the sequenced strains of RT2 and RT6 encoded a complete set of CRISPR/Cas genes and at least one repeat and spacer sequence, while none of the other ribotype strains did. Based on its complete genome sequence (20), strain ATCC11828 appeared to be an exception, having only terminal sequence but no spacer sequence. However, using PCR and sequencing it was determined that ATCC11828 has one repeat-spacer sequence (Table S2).

TABLE S2
CRISPR spacer sequences found in the genomes of ATCC 11828, HL042PA3 and HL202PA1.

| | | | | | Match |
|---|---|---|---|---|---|
| Strain | Ribotype | Spacer | Protospacer | BLAST result | found in |
| ATCC11828 | RT2 | 1 | CATCTGCCAACGAGCGAGTGGCGCGGTGTTC | No hits | |
| | | 2 | CGAGGGCTACCACGTGGTCGATTTGGACTGTCG | Clostridium leptum DSM 753, | |
| | | | | CLOLEP_00167, | Locus 2 |
| | | | | Propionibacterium acnes SK137, | |
| | | | | HMPREF0675_3193 | |
| | | | | (Domain of unknown function) | |
| | | 3 | CAGGCGCTCCACTCCCTCGCCCTGGCCACCAAC | No hits | |
| HL042PA3 | RT6 | 1 | CTGACTGGTTTGGGTCATACGTCTTCTGACACG | Propionibacterium acnes phage | |
| | | | | PAD6 gp14 (Tape measure protein) | |
| | | | | Propionibacterium acnes phage | |
| | | | | PAD20 gp14 (Tape measure protein) | |
| | | | | Propionibacterium acnes phage | |
| | | | | PAS50 gp14 (Tape measure protein) | |
| | | 2 | TCACAGGCCACGCAGGCACATCACCCTTATTAG | Propionibacterium acnes phage | |
| | | | | PAD6 gp12 (Minor tail protein) | |
| | | | | Propionibacterium acnes phage | |
| | | | | PAD20 gp15 (Minor tail protein) | |
| | | | | Propionibacterium acnes phage | |
| | | | | PAS50 gp15 (Minor tail protein) | |
| | | 3 | CTCCCCCTCCTCCCCGGGAGGAAAAGCAGACCA | Propionibacterium acnes phage | |
| | | | | PAS50 gp15 (Minor tail protein) | |
| | | | | Clostridium leptum D3M 753, | |
| | | | | CLOLEP_00167. | |
| | | 4 | CGAGGGCTACCACGTGGTCGATTTGGACTGTCG | Propionibacterium acnes SK137, | Lotus 2 |
| | | | | HMPREF0675_3193 | |
| | | | | (Domain of unknown function) | |
| HL202PA1 | RT6 | 1 | CGAGGGCTACCACGTGGTCGATTTGGACTGTCG | Clostridium leptum DSM 753, | |
| | | | | CLOLEP_00167, | Locus 2 |
| | | | | Propionibacterium acnes SK137, | |
| | | | | HMPREF0675_3193 | |
| | | | | (Domain of unknown function) | |
| | | 2 | CAGGCGCTCCACTCCCTCGCCCTGGCCACCAAC | No hits | |

[0206] A total of 48 spacer sequences were found in the 11 RT2 and RT6 strains, 29 of which were unique. In other bacterial species, it has been established experimentally and computationally that the spacers at the leader-proximal end are more diversified, while the spacers at the leader-distal end are more conserved among strains. The evolutionary relationships among the RT2 and RT6 strains based on their shared spacer sequences were analyzed. HL060PA1 and HL082PA2, which were clustered tightly in clade II, shared the same spacer S2 (FIG. 21). J139, ATCC11828, HL110PA4, HL110PA3, and HL202PA1 shared the same spacers S17 and S18 (FIG. 21). These results suggest that these groups of strains probably evolved from the same ancestors before having acquired additional spacers. The relationships among the strains based on shared CRISPR spacers are consistent with the phylogenetic relationships calculated based on the SNPs in the core regions. In addition, multiple type II strains harbored spacer sequences that match to the sequences in loci 2 and 3, which were unique to mainly acne-associated RT4 and RT5 strains (4). The sequences in loci 2 and 3 appeared to be originated from C. leptum and encode potential virulence factors (FIG. S4). These loci may have been acquired by RT4 and RT5 strains, while the genomes of RT2 and RT6 that encode these spacers may be capable of eliminating the invasion of foreign DNA through the CRISPR mechanism (4).

[0207] The large number of high quality draft genome sequences enabled detection not only large genomic variations, but also small but essential genomic alterations. It was previously reported that type II strains showed decreased lipase activity (10). Lipase functions in hydrolyzing triglycerides and releasing free fatty acids, which is thought to be essential in P. acnes virulence. Based on the genome annotation, 13 genes were identified with a potential function of lipase (FIG. 22a). Among them, detected insertions/deletions ranging from one nucleotide to 13 nucleotides may explain the decreased lipase activity in type II strains. Two triacylglycerol lipases were encoded in tandem in P. acnes genomes, HMPREF0675-4855 and HMPREF0675-4856 (according to the annotation of SK137). All the type II strains and IB-3 strains had a deletion of the “TATA-box” 20 by upstream of the start codon of the second lipase gene, HMPREF0675-4856 (FIG. 22b). In addition, there was a one-nucleotide deletion at the position of 124G of the second lipase gene, leading to a frameshift and the introduction of a premature stop codon. These two deletions may potentially explain the decreased lipase activity and hence decreased virulence in acne observed in type II strains in previous studies (4, 10).

### Non-Core Genome Regions in the Type III Strain

[0208] Type III strains are rarely found on the skin surface. A type III P. acnes strain isolated from refractory endodontic lesion, HL201 PA1, was sequenced. This first available type III genome permitted the identification of the genetic elements specific to this lineage. Compared to type I and type II strains, the genome of HL201 PA1 lacks a few regions with a total length of 43 Kb (FIG. 20). There were 42 ORFs encoded in these regions, including anaerobic dimethyl sulfoxide reductase (PPA0516-PPA0517), iron(III) dicitrate transport system permease (PPA0792-PPA0793), 3-isopropylmalate dehydratase (PPA1361-PPA1363), and maltose transport system permease (PPA1553-PPA1554).

### Discussion

[0209] High-throughput genome sequencing and comparative analysis of a large number of related strains have been used to study the spread and microevolution of several pathogens at the strain level, including methicillin-resistant Staphylococcus aureus (29), Streptococcus pneumoniae (30), and Vibrio cholerae in Haiti outbreak (31), demonstrating the power of comparative genome analysis of multiple strains in improving our understanding of the bacterial pathogens. However, this approach has been rarely applied to study commensal species to understand their varied virulent potentials among different strains and their roles in both health and diseases.

[0210] This study presents a comparative genome analysis of a major skin commensal, P. acnes, based on a large number of sequenced strains. This collection of strains not only includes strains associated with either healthy skin or acne, but also a large number of strain pairs that were isolated from the same individuals. This allowed the comparison of phylogenetic relationships and microevolution of the P. acnes strains associated with health vs. disease as well as of the strains in the same individual microbiome.

[0211] By comparing 82 P. acnes genomes, it was shown that all P. acnes strains had a similar genome size with a similar GC content, encoding 2,577 ORFs on average (Table 1). Although P. acnes has an open pan-genome, unlike many other open-genome species (24), it has limited genome expansion with only a few new genes added per genome (FIGS. 13 and 14). The rate of genome expansion is similar within the major lineages (FIG. 17). There was limited recombination among different P. acnes strains, and thus 16S rRNA ribotypes can be used as a proxy for P. acnes strain identification and classification (FIG. 16). Compared to other typing methods, 16S ribotyping has a much higher resolution than recA typing and is much easier and faster than the traditional MLST method. This method can be applied in a high-throughput manner by combining with next-generation sequencing, and thus allows one to detect the microbiome variations at the strain level (4). This is advantageous and important, as identifying and understanding the strain level variations of the human microbiome is medically important.

[0212] The genomes of the sets of strains isolated from the same individual samples were compared (FIGS. 16 and 19). This collection of genome data is unique and no such kind of study has been performed to investigate the microevolution of a human commensal within an individual microbiome. It was found that while multiple P. acnes strain populations co-existed in the same individual microbiome, clonal expansions occurred in each population with little recombination among different populations. Within each lineage, the strains isolated from the same individuals were significantly more similar to each other than strains from different individuals except the disease associated strains, RT4 and RT5 strains (FIG. 19). Although isolated from different individuals, they appeared to be clonal and have evolved from the same virulent ancestor strain (FIG. 16). This supports the observation that these strains were transmissible (26) and that they may play a role in acne pathogenesis (4). This finding is important and will help control the spread of antibiotic resistant strains and develop new targeted therapy for acne.

[0213] By analyzing the non-core regions, the genomic elements and alterations specific to each lineage were identified (FIG. 20). These lineage-specific elements may render the strains different physiological and functional properties and thus lead to their different roles as a commensal in health or as a pathogen in diseases. Among the acne associated strains, RT4 and RT5 strains encode three distinct loci originated from mobile elements, and RT8 strains encode a distinct region containing a set of NRPS. The virulent genes encoded in these strain-specific regions may explain the associations of these strains with acne and help the development of new drugs targeting against these strains. RT2 and RT6 strains, which were not associated with acne and were enriched in healthy skin, respectively, all encode CRISPR/cas elements. The CRISPR mechanism may prevent these strains from acquiring virulent genes from invading foreign mobile elements. In addition, these strains contain genomic variations in lipases that may alter lipid metabolism and reduce their virulence (FIG. 22).

[0214] In conclusion, by characterizing the genetic landscape and diversity of P. acnes with a large number of genomes, genomic evidence that may explain the diverse phenotypes of P. acnes strains and a new insight into the dual role of this commensal in human skin health and disease is provided. The findings from this comparative genome analysis provide new perspectives on the strain diversity and evolution of commensals in the human microbiome. As many current microbiome studies focus on the associations of microbial communities with health and diseases, this study underscores the importance of understanding the commensal microbiome at the strain level (25). The findings from this study also shed light on new strain-specific therapeutics for acne and other P. acnes associated diseases.

### Materials and Methods

[0215] P. acnes Strains

[0216] Among the 69 P. acnes strains that were sequenced, 67 were isolated from the skin microcomedone samples from acne patients and healthy individuals (4). The other two strains, HL201PA1 and HL202PA1, were isolated from refractory endodontic lesions (23), provided by Dr. David Beighton at the King's College London.

### Whole Genome Shotgun Sequencing, Assembly, and Annotation

[0217] The genome of HL042PA3 was sequenced using Roche/454 FLX and assembled using a combination of PHRAP/CONSED (32) and GSMAPPER (Roche). HL201PA1 and HL202PA1 were sequenced using Illumina MiSeq (250 bp, paired-end) and assembled using Velvet (33). The remaining 66 genomes were sequenced previously as described (4). Coding sequences were predicted using GeneMark (34) and GLIMMER (35).

### Computation of the Core Regions, Non-Core Regions and the Pan-Genome

[0218] The core regions were defined as genome sequences that were present in all 82 genomes, while the non-core regions were defined as genome sequences that were not present in all the genomes. KPA171202 was used as the reference genome. Each of the other 81 genome sequences (a series of contigs in most of the genomes and ten complete genomes) was mapped to the reference genome using Nucmer (36). All the 81 “.coords” output files of Nucmer program were analyzed to identify overlap regions based on the KPA171202 coordinates using a Perl script. Core sequences were then extracted based on the genome sequence of KPA171202 with the coordinates calculated above.

[0219] The unique regions from each genome were added to the reference genome to make a “revised” reference genome, which contained the original sequence plus the unique genome sequences. This process was repeated for all the genomes until all the unique regions from all genomes were included in the pan-genome.

[0220] Lastly, core regions were subtracted from the pan-genome. The remaining regions were defined as non-core regions, which are not shared by all the strains. Protein coding sequences were predicted by GeneMark.hmm using KPA171202 as a reference file.

### Identification of SNPs in the Core Regions

[0221] Single nucleotide polymorphisms (SNPs) were identified by using “show-snps” utility option of the Nucmer program with the default settings (36). Genome sequence of KPA171202 was used as the reference genome. All the 81 “.snps” output files of Nucmer program were analyzed to identify unique SNP positions based on the KPA171202 coordinates using a Perl script.

### Phylogenetic Tree Construction

[0222] The 82 concatenated sequences of the 123,223 SNP nucleotides in the core region were used to construct a phylogenetic tree of the P. acnes genomes. MEGA5 (37) was used to calculate the distance based on the SNPs in the core regions using the Neighbor-Joining method and the p-distance method. The bootstrap tree inferred from 200 replicates was taken.

### Sequence Type Analysis Based on MLST Schemes

[0223] The sequence types of the 82 isolates were determined based on the MLST schemes published previously (11-13). The MLST gene sequences were aligned using BLAST against all the alleles used in the two MLST schemes.

### Identification of CRISPR/Cas

[0224] CRISPRFinder (38) was used to identify the CRISPR repeat-spacer sequences. The annotation of HL110PA3 was used for BLAST alignment in order to identify the presence of CRISPR/Cas structure and CRISPR repeat-spacer sequences in strains of HL001PA1, HL060PA1, HL042PA3, HL082PA2, HL103PA1, HL106PA1, HL110PA4, HL202PA1, J139 and ATCC11828. Each spacer sequence was annotated by BLAST (39) against NCBI's non-redundant nucleotide database and the reference genomic sequences database (refseq_genomic).

### Hierarchical Clustering Analysis of the Non-Core Regions

[0225] Among the 1,685 non-core fragments (895,905 by in total), 314 non-core fragments with a length of >500 by (747,189 by in total, corresponding to 83% of all the non-core regions) were extracted and used in hierarchical clustering of the non-core regions. Cluster 3.0 program (40) and average linkage method was used. The clustering matrix was composed of 314 rows and 82 columns, in which 1 denotes presence of the non-core region and 0 denotes absence of the non-core region. Java TreeView program (41) was used to display the clustering result.

### REFERENCES

[0226] 1. Grice E A, Segre J A. 2011. The skin microbiome. Nat Rev Microbiol 9:244-253.
[0227] 2. White G M. 1998. Recent findings in the epidemiologic evidence, classification, and subtypes of acne vulgaris. J Am Acad Dermatol 39:S34-37.
[0228] 3. http://precedings.nature.com/documents/5305/version/1
[0229] 4. Fitz-Gibbon S T, Tomida S, Chiu B, Nguyen L, Du C, Liu M, Elashoff D, Erfe M C, Loncaric A, Kim J, Modlin R L, Miller J F, Sodergren E, Craft N, Weinstock G M, Li H. Propionibacterium acnes strain populations in the human skin microbiome associated with acne. Journal of Investigative Dermatology (in press).
[0230] 5. Chambers H F, Deleo F R. 2009. Waves of resistance: Staphylococcus aureus in the antibiotic era. Nat Rev Microbiol 7:629-641.
[0231] 6. Chase-Topping M, Gaily D, Low C, Matthews L, Woolhouse M. 2008. Super-shedding and the link between human infection and livestock carriage of Escherichia coli 0157. Nat Rev Microbiol 6:904-912.
[0232] 7. Johnson J L, Cummins C S. 1972. Cell wall composition and deoxyribonucleic acid similarities among the anaerobic coryneforms, classical propionibacteria, and strains of Arachnia propionica. J Bacteriol 109:1047-1066.
[0233] 8. McDowell A, Valanne S, Ramage G, Tunney M M, Glenn J V, McLorinan G C, Bhatia A, Maisonneuve J F, Lodes M, Persing D H, Patrick S. 2005. Propionibacterium acnes types I and II represent phylogenetically distinct groups. J Clin Microbiol 43:326-334.
[0234] 9. Valanne S, McDowell A, Ramage G, Tunney M M, Einarsson G G, O'Hagan S, Wisdom G B, Fairley D, Bhatia A, Maisonneuve J F, Lodes M, Persing D H, Patrick S. 2005. CAMP factor homologues in Propionibacterium acnes: a new protein family differentially expressed by types I and II. Microbiology 151:1369-1379.
[0235] 10. McDowell A, Perry A L, Lambert P A, Patrick S. 2008. A new phylogenetic group of Propionibacterium acnes. J Med Microbiol 57:218-224.
[0236] 11. Lomholt H B, Kilian M. 2010. Population genetic analysis of Propionibacterium acnes identifies a subpopulation and epidemic clones associated with acne. PLoS One 5:e12277.
[0237] 12. McDowell A, Gao A, Barnard E, Fink C, Murray P I, Dowson C G, Nagy I, Lambert P A, Patrick S. 2011. A novel multilocus sequence typing scheme for the opportunistic pathogen Propionibacterium acnes and characterization of type I cell surface-associated antigens. Microbiology 157:1990-2003.
[0238] 13. McDowell A, Barnard E, Nagy I, Gao A, Tomida S, Li H, Eady A, Cove J, Nord C E, Patrick S. 2012. An Expanded Multilocus Sequence Typing Scheme for Propionibacterium acnes: Investigation of ‘Pathogenic’, ‘Commensal’ and Antibiotic Resistant Strains. PLoS One 7:e41480.
[0239] 14. Bruggemann H, Henne A, Hoster F, Liesegang H, Wiezer A, Strittmatter A, Hujer S, Durre P, Gottschalk G. 2004. The complete genome sequence of Propionibacterium acnes, a commensal of human skin. Science 305:671-673.
[0240] 15. The Human Microbiome Project Consortium. 2012. A framework for human microbiome research. Nature 486:215-221.
[0241] 16. The Human Microbiome Project Consortium. 2012. Structure, function and diversity of the healthy human microbiome. Nature 486:207-214.
[0242] 17. Nelson K E, Weinstock G M, Highlander S K, Worley K C, Creasy H H, Wortman J R, Rusch D B, Mitreva M, Sodergren E, Chinwalla A T, Feldgarden M, Gevers D, Haas B J, Madupu R, Ward D V, Birren B W, Gibbs R A, Methe B, Petrosino J F, Strausberg R L, Sutton G G, White O R, Wilson R K, Durkin S, Giglio M G, Gujja S, Howarth C, Kodira C D, Kyrpides N, Mehta T, Muzny D M, Pearson M, Pepin K, Pati A, Qin X, Yandava C, Zeng Q, Zhang L, Berlin A M, Chen L, Hepburn T A, Johnson J, McCorrison J, Miller J, Minx P, Nusbaum C, Russ C, Sykes S M, Tomlinson C M, Young S, Warren W C, Badger J, Crabtree J, Markowitz V M, Orvis J, Cree A, Ferriera S, Fulton L L, Fulton R S, Gillis M, Hemphill L D, Joshi V, Kovar C, Torralba M, Wetterstrand K A, Abouellleil A, Wollam A M, Buhay C J, Ding Y, Dugan S, FitzGerald M G, Holder M, Hostetler J, Clifton S W, Allen-Vercoe E, Earl A M, Farmer C N, Liolios K, Surette M G, Xu Q, Pohl C, Wilczek-Boney K, Zhu D. 2010. A catalog of reference genomes from the human microbiome. Science 328:994-999.
[0243] 18. Brzuszkiewicz E, Weiner J, Wollherr A, Thurmer A, Hupeden J, Lomholt H B, Kilian M, Gottschalk G, Daniel R, Mollenkopf H J, Meyer T F, Bruggemann H. 2011. Comparative genomics and transcriptomics of Propionibacterium acnes. PLoS One 6:e21581.
[0244] 19. Hunyadkurti J, Feltoti Z, Horvath B, Nagymihaly M, Voros A, McDowell A, Patrick S, Urban E, Nagy I. 2011. Complete genome sequence of Propionibacterium acnes type IB strain 6609. J Bacteriol 193:4561-4562.
[0245] 20. Horvath B, Hunyadkurti J, Voros A, Fekete C, Urban E, Kemeny L, Nagy I. 2012. Genome sequence of Propionibacterium acnes type II strain ATCC 11828. J Bacteriol 194:202-203.
[0246] 21. Voros A, Horvath B, Hunyadkurti J, McDowell A, Barnard E, Patrick S, Nagy I. 2012. Complete genome sequences of three Propionibacterium acnes isolates from the type IA(2) cluster. J Bacteriol 194:1621-1622.
[0247] 22. McDowell A, Hunyadkurti J, Horvath B, Voros A, Barnard E, Patrick S, Nagy I. 2012. Draft genome sequence of an antibiotic-resistant Propionibacterium acnes strain, PRP-38, from the novel type IC cluster. J Bacteriol 194:3260-3261.
[0248] 23. Niazi S A, Clarke D, Do T, Gilbert S C, Mannocci F, Beighton D. 2010. Propionibacterium acnes and Staphylococcus epidermidis isolated from refractory endodontic lesions are opportunistic pathogens. J Clin Microbiol 48:3859-3869.
[0249] 24. Tettelin H, Riley D, Cattuto C, Medini D. 2008. Comparative genomics: the bacterial pan-genome. Curr Opin Microbiol 11:472-477.
[0250] 25. Schloissnig S, Arumugam M, Sunagawa S, Mitreva M, Tap J, Zhu A, Waller A, Mende D R, Kultima J R, Martin J, Kota K, Sunyaev S R, Weinstock G M, Bork P. 2013. Genomic variation landscape of the human gut microbiome. Nature 493:45-50.
[0251] 26. Ross J I, Snelling A M, Carnegie E, Coates P, Cunliffe W J, Bettoli V, Tosti G, Katsambas A, Galvan Perez Del Pulgar J I, Rollman O, Torok L, Eady E A, Cove J H. 2003. Antibiotic-resistant acne: lessons from Europe. The British journal of dermatology 148:467-478.
[0252] 27. Jackson A P, Thomas G H, Parkhill J, Thomson N R. 2009. Evolutionary diversification of an ancient gene family (rhs) through C-terminal displacement. BMC Genomics 10:584.
[0253] 28. Horvath P, Barrangou R. 2010. CRISPR/Cas, the immune system of bacteria and archaea. Science 327:167-170.
[0254] 29. Harris S R, Feil E J, Holden M T, Quail M A, Nickerson E K, Chantratita N, Gardete S, Tavares A, Day N, Lindsay J A, Edgeworth J D, de Lencastre H, Parkhill J, Peacock S J, Bentley S D. 2010. Evolution of MRSA during hospital transmission and intercontinental spread. Science 327:469-474.
[0255] 30. Croucher N J, Harris S R, Fraser C, Quail M A, Burton J, van der Linden M, McGee L, von Gottberg A, Song J H, Ko K S, Pichon B, Baker S, Parry C M, Lambertsen L M, Shahinas D, Pillai D R, Mitchell T J, Dougan G, Tomasz A, Klugman K P, Parkhill J, Hanage W P, Bentley S D. 2011. Rapid pneumococcal evolution in response to clinical interventions. Science 331:430-434.
[0256] 31. Chin C S, Sorenson J, Harris J B, Robins W P, Charles R C, Jean-Charles R R, Bullard J, Webster D R, Kasarskis A, Peluso P, Paxinos E E, Yamaichi Y, Calderwood S B, Mekalanos J J, Schadt E E, Waldor M K. 2011. The origin of the Haitian cholera outbreak strain. The New England journal of medicine 364:33-42.
[0257] 32. Gordon D, Abajian C, Green P. 1998. Consed: a graphical tool for sequence finishing. Genome Res 8:195-202.
[0258] 33. Zerbino D R, Birney E. 2008. Velvet: algorithms for de novo short read assembly using de Bruijn graphs. Genome Res 18:821-829.
[0259] 34. Borodovsky M, McIninch J. 1993. Recognition of genes in DNA sequence with ambiguities. Biosystems 30:161-171.
[0260] 35. Salzberg S L, Delcher A L, Kasif S, White O. 1998. Microbial gene identification using interpolated Markov models. Nucleic Acids Res 26:544-548.
[0261] 36. Kurtz S, Phillippy A, Delcher A L, Smoot M, Shumway M, Antonescu C, Salzberg S L. 2004. Versatile and open software for comparing large genomes. Genome Biol 5:R12.
[0262] 37. Tamura K, Peterson D, Peterson N, Stecher G, Nei M, Kumar S. 2011. MEGA5: molecular evolutionary genetics analysis using maximum likelihood, evolutionary distance, and maximum parsimony methods. Mol Biol Evol 28:2731-2739.
[0263] 38. Grissa I, Vergnaud G, Pourcel C. 2007. CRISPRFinder: a web tool to identify clustered regularly interspaced short palindromic repeats. Nucleic Acids Res 35:W52-57.
[0264] 39. Altschul S F, Gish W, Miller W, Myers E W, Lipman D J. 1990. Basic local alignment search tool. J Mol Biol 215:403-410.
[0265] 40. de Hoon M J, Imoto S, Nolan J, Miyano S. 2004. Open source clustering software. Bioinformatics 20:1453-1454.
[0266] 41. Saldanha A J. 2004. Java Treeview—extensible visualization of microarray data. Bioinformatics 20:3246-3248.

### Example 3

### Microbial DNA Extraction from Skin Samples

### Skin Microcomedone Sampling

[0267] Skin microcomedone (white head or black head) samples were taken from the skin of the subjects using a specialized adhesive tape. The skin was moistened with water before the adhesive tape was put on. The tape was left on the skin for 15-20 minutes until it became dry. Clean gloves were used for each sampling. After being taken off from the skin, the tape was placed into a 50 mL sterile tube. This can be applied to many skin sites, such as the nose, forehead, chin, and back.

### Bacterial DNA Extraction

[0268] Microcomedones were individually picked or scraped off from the adhesive tape using sterile forceps and placed in a 2 mL sterile microcentrifuge tube filled with Buffer ATL (Qiagen) and 0.1 mm diameter glass beads (BioSpec Products, Inc., Bartlesville, Okla.). Cells were lysed using a beadbeater for 3 minutes at 4,800 rpm at room temperature. After centrifugation at 14,000 rpm for 5 minutes, the supernatant was retrieved and used for genomic DNA extraction using QIAamp DNA Micro Kit (Qiagen). The manufacturer protocol for extracting DNA from chewing gum was used. Concentration of the genomic DNA was determined by a spectrometer.

### Example 4

### Microbiome Type Detection

[0269] Detailed Protocol for Accurate Detection of the Skin Microbiome Type Based on 16S rDNA

### PCR Amplification, Cloning, and Sequencing

[0270] 16S rDNA was amplified using primers 8F (5′-AGAGTTTGATYMTGGCTCAG-3′) and 1510R (5′-TACGGYTACCTTGTTACGACTT-3′). Thermocycling conditions were as following: initial denaturation step of 5 minutes at 94° C., 30 cycles of denaturation at 94° C. for 45 seconds, annealing at 52° C. for 30 seconds and elongation at 72° C. for 90 seconds, and a final elongation step at 72° C. for 20 minutes. PCR products were purified using column-based method. Subsequently, the 16S rDNA amplicons were cloned into pCR 2.1-TOPO vector (Invitrogen). One-Shot TOP-10 Chemically Competent E. coli cells (Invitrogen) were transformed with the vectors and plated on selective media. Individual positive colonies were picked and inoculated into selective LB liquid medium. After 14 hours of incubation, the plasmids were extracted and purified, either using column-based plasmid extraction kit or traditional methods. The clones were sequenced bidirectionally using Sanger sequencing method. The microbiome type of each individual was determined based on the 16S rDNA sequence data of the top 10 major ribotypes. See FIG. 5 and SEQ ID NOs 1-10.

Detailed Protocols for Fast Detection of the Skin Microbiome Type Based on PCR and qPCR

[0271] By sequencing and annotating 69 novel P. acnes genomes and by comparing a total of 82 P. acnes genomes, several genomic loci which are unique to acne associated P. acnes strains were identified, i.e., Loci 1-4. See FIG. 8. The genomic sequences of Loci 1, 2, 3, and 4 from all sequences P. acnes strains and their sequence similarities, which range from 95% to 100%, are listed as SEQ ID NOs 15-18, respectively.

### Detection Method 1

[0272] To rapidly detect the presence or absence of RT4 and RT5 strains in patients, multiplex PCR targeting Loci 1, 2, and 3 was designed and performed on genomic DNA extracted from P. acnes strains and skin samples. FIG. 23 shows that Loci 1, 2, and 3 were amplified from various P. acnes strains as predicted based on the genome data.

[0273] The PCR primer sequences are shown in Table 1:

TABLE 1
Primers specific for loci 1, 2, 3 and Pak
(housekeeping gene)

| Target | | |
|---|---|---|
| locus | Forward primer | Reverse primer |
| Locus 1 | GGTATCCACCGAGATGGAAG | GTGGTCCCAGGTGACATTCT |
| | (SEQ ID NO: 11) | (SEQ ID NO: 12) |
| Locus 2 | CGACATCGACGTTTCATCTG | GTGTTCTCCTCGTGCTGGTT |
| | (SEQ ID NO: 13) | (SEQ ID NO: 14) |
| Locus 3 | GATAATCCGTTCGACAAGCTG | ACCCACCACGATGATGTTT |
| | (SEQ ID NO: 15) | (SEQ ID NO: 16) |
| Pak | CGACGCCTCCAATAACTTCC | GTCGGCCTCCTCAGCATC |

Additional primers targeting these loci can be designed based on the genome sequences of loci 1-4 (SEQ ID NOs 15-18, respectively). Each 20 μL reaction contains 12.7 μL molecular grade H2O, 2 μL 10× High Fidelity Buffer, 0.6 μL 50 mM MgSO4, 0.4 μL 10 nM dNTP, 0.8 μL of each primer (final primer concentrations is 400 nM), 0.1 μL Platinum Taq DNA Polymerase High Fidelity (All reagents from Invitrogen) and 1 μL gDNA template (approx. 40 ng gDNA). The thermocycling conditions are as following: initial denaturation step of 10 minutes at 95° C.; 35 cycles with each consisting of 45 seconds at 95° C., 30 seconds at 65° C. and 45 seconds at 72° C.; and final elongation step of 10 minutes at 72° C.

[0274] To quantitatively measure the abundance of acne associated P. acnes strains in skin samples, quantitative PCR (qPCR) targeting Loci 1, 2, and 3 were performed on genomic DNA extracted from P. acnes strains. See FIG. 12. LightCyler 480 High Resolution Melting Master kit was used (Roche Diagnostics GmbH, Mannheim, Germany). Each 10 μL reaction contains 5 μL of Master Mix (2× concentrate), 1 μL of 25 mM MgCl2, 0.5 μL of 4 μM forward and reverse primers, 1 μL to 3.5 μL of DNA template (approximately 2.5 ng DNA), and molecular grade H2O, up to the volume. The thermocycling conditions were as following: initial activation step of 10 minutes at 95° C.; 40 amplification cycles with each consisting of 10 seconds at 95° C., 15 seconds at 65° C. during first cycle, but with a stepwise 0.5° C. decrease for each succeeding cycle and 30 seconds at 72° C.; and finally, a melting curve step, starting at 65° C. and ending at 99° C., with ramp rate of 0.02° C./s and acquisition rate of 25 per ° C.

[0275] The protocol was tested using mock samples, where different strains of P. acnes were mixed in different proportions to mimic the strain population distributions in real samples. See Table 2.

TABLE 2
Mock samples mimicking the microbiome
types observed in human skin samples

| | Micro- | | Percentage | Abun- | Abun- |
|---|---|---|---|---|---|
| Mock | biome | Dominant | of dominant | dance of | dance of |
| sample | type | isolate | isolate | Locus 1 | Locus 2 |
| 1A | I | HL036PA3 | 80 | 7.5% | 7.5% |
| 1B | I | HL078PA1 | 80 | 7.5% | 87.5% |
| 1C | I | HL106PA2 | 80 | 87.5% | 87.5% |
| 2 | II | HL103PA1 | 80 | 8.0% | 10.0% |
| 3 | III | HL087PA3 | 80 | 8.0% | 10.0% |
| 4 | IV | HL038PA1 | 70 | 79.0% | 82.0% |
| 5A | V | HL072PA2 | 80 | 6.7% | 8.9% |
| 5B | V | HL096PA1 | 80 | 86.7% | 88.9% |
| 6 | minor | HL110PA4 | 70 | 12.0% | 15.0% |
| 8A | minor | HL086PA1 | 70 | 80.0% | 83.3% |
| 8B | minor | HL092PA1 | 70 | 10.0% | 13.3% |

[0276] The concentration of each locus was quantified from standards derived from Locus 1, Locus 2, and Pak PCR amplicons. The copy number of each gene was quantified from genomic DNA standards that were derived from TadA (in Locus 3) and Pak amplicons using conventional PCR. See FIG. 24.

### Detection Method 2

[0277] P. acnes TaqMan qPCR Assay

### Primer and Probe Design

[0278] Primers and probes for detecting Loci 1, 2, 3, and 4 in P. acnes strains and clinical samples were designed as listed in Table 3:

TABLE 3
Primer and probe sequences used for identification of P. acnes loci

| Targeted | | Primer/Probe | | Amplicon |
|---|---|---|---|---|
| region | Primer/Probe | name | Sequence (5′-3′) | size (bp) |
| Locus1 | forward primer | Locus1_F | GAAGAATCCCGCTCCATTTCC | 107 |
| | | | (SEQ ID NO: 17) | |
| | reverse primer | Locus1_R | CCTTTCTTGTAGCCGAGCAG | |
| | | | (SEQ ID NO: 18) | |
| | Probe | Locus1_Probe | 56-FAM/ATTGTCACC/ZEN/TGGGACCACCGTAAAC/3IABkFQ | |
| | | | (SEQ ID NO: 19) | |
| Locus2 | forward primer | Locus2_F | CGTGATCCTGATCGACTGTG | 103 |
| | | | (SEQ ID NO: 20) | |
| | reverse primer | Locus2_R | GCTCCACAACTTCGAGTGC | |
| | | | (SEQ ID NO: 21) | |
| | probe | Locus2_Probe | CAGGCCGTTGATCGTGAGCTGA | |
| | | | (SEQ ID NO: 22) | |
| Locus3 | forward primer | Locus3_F | TGCTGATAATCCGTTCGACA | 104 |
| | | | (SEQ ID NO: 23) | |
| | reverse primer | Locus3_R | ACGACGTCGAAAACAACTCC | |
| | | | (SEQ ID NO: 24) | |
| | probe | Locus3_Probe | 5TET/CTCTACCGA/ZEN/AGCTCTTGCCGCAT/3IABkFQ | |
| | | | (SEQ ID NO: 25) | |
| Locus4 | forward primer | Locus4_F | ATCGCCGTCGACAGGTAGT | 103 |
| | | | (SEQ ID NO: 26) | |
| | reverse primer | Locus4_R | CCGAGATTCTGCGCCTAGT | |
| | | | (SEQ ID NO: 27) | |
| | probe | Locus4_Probe | CGGTGCCCTTGCTGAGGTACA | |
| | | | (SEQ ID NO: 28) | |
| Pak | forward primer | Pak_F | GCAACCCGACATCCTCATTA | 101 |
| | reverse primer | Pak_R | AGTCGAAGAAGTCGCTCAGG | |
| | probe | Pak_Probe | VIC/CGTTCTACAGCCACCACGACGG/TAMRA | |

A triplex Taqman qPCR was designed and tested using Propionibacterium specific primers to target Locus 1, Locus 3, and an internal control, Pak, present in all P. acnes.

### Locus 1, Locus 3, and Pak Amplification

[0279] Benchtop amplification was carried out to assess specificity of designed primers and to determine optimum cycling conditions prior to multiplexing. Amplification was carried out using a BioRad C1000 thermal cycler. Singleplex PCR reactions contained 0.2 μM target specific primers, 10× Platinum Taq buffer (Invitrogen), 1.0 mM MgCl2, 0.2 mM each dNPT, 0.5 U/pl Platinum Taq polymerase, 1 μl DNA template and made up to a final volume of 10 μl. Cycling was as follows: initial denaturation 94° C. for 5 minutes, followed by 30 cycles of denaturation at 94° C. for 30 seconds, annealing at 60° C. for 30 seconds and extension at 72° C. for 30 seconds, and one final extension cycle at 72° C. for 5 minutes. Amplification products were analysed electrophoretically on a 1% agarose/TBE gel to check for correct amplification of target and cross-species reactivity with primer targets.

### Taqman Triplex PCR

[0280] Triplex qPCR was carried out using an Applied Biosystems 7900HT instrument. 1-2 μl of sample DNA were added to mastermix containing X2 QuantiTect Multiplex PCR Master Mix (Qiagen), 0.2 μM primers; Locus1_F, Locus1_R, Pak F, Pak R; 0.2 μM probes; Locus1_Probe and Pak_Probe, and 0.1 μM primers Locus3_F and Locus3_R, and 0.1 μM Locus3_Probe. The reaction mix was made up to a final volume of 20 μl with sterile PCR grade water. The PCR program consisted of one cycle at 50° C. for 2 minutes, followed by one cycle at 95° C. for 15 minutes to allow for activation of the multiplex mastermix, then 45 cycles of 94° C. for 60 seconds and 57° C. for 90 seconds. Each run contained calibrators of extracted P. acnes DNA from culture, as well as no-template controls (NTC) and water controls. qPCR was run with a passive reference, ROX, supplied in the Quantitect Multiplex PCR mastermix. Data were analysed using the SDS v2.4 software.

### Assay Calibration, Sensitivity, and Specificity

[0281] Calibrations curves for P. acnes targets Locus 1 and Pak were constructed by plotting mean Ct values for a series of log dilutions of quantified genomic DNA standards extracted from P. acnes from pure culture. Genome equivalents were estimated. Five replicates of P. acnes calibrators were used to calculate mean Ct values and standard deviations. These data were used to determine sensitivity of the assay and the limits of detection (LOD). Calibration plots were used to determine the number of P. acnes genomes in clinical samples, with one copy of Locus1 and Pak targets per genome. DNA concentration and copy number were determined and serial ten-fold dilutions of the purified product were used as standards for construction of the Locus3 calibration plot. Strains that display possible combinations of the presence and absence of Locus1 and Locus 3 were used for Locus1 and Pak calibration: HL038PA1 (Locus1+, Locus3+), HL083PA1 (Locus1+, Locus3−), HL078PA1 (Locus1−, Locus3+) and HL063PA1 (Locus1−, Locus3−). The assay was validated using sequenced P. acnes strains from pure culture with known loci before being applied to clinical samples. The specificity of the assay for each target was tested using other bacterial species including skin commensals and other Propionibacteria.

### Assay Validation

[0282] A total of 24 sequenced P. acnes strains (HL063PA1, HL078PA1, HL083PA1, HL038PA1, HL037PA1, HL082PA1, HL020PA1, HL001PA1, HL046PA2, HL043PA1, HL086PA1, HL110PA3, HL110PA4, HL007PA1, HL087PA3, HL027PA1, HL056PA1, HL067PA1, HL074PA1, HL045PA1, HL053PA1, HL005PA1, HL072PA1, HL043PA2) including possible combinations with and without Locus 1 and Locus 3 were used to validate the triplex qPCR assays. The qPCR triplex assay successfully identified Locus 1 and Locus 3 in strains previously shown by whole genome sequencing to harbor these loci.

### Application to Clinical Samples

[0283] Genomic DNA extracted from two clinical samples, #1 and #2, were analyzed using the Taqman qPCR triplex assay. Amplification plots revealed the presence of P. acnes (Pak) in both samples (FIG. 6). Locus1 and Locus 3 targets were also detected in both samples with a much larger percentage of P. acnes Locus1 positive and Locus3 positive strains present in 1 μl of sample #1 compared to sample #2.

### Example 5

### Acne Vaccine

[0284] Strains with 16S rDNA ribotypes (RTs) 4, 5, 7, 8, 9, and 10 were identified as highly associated with acne. Vaccines can be raised against these strains. See T. Nakatsuji et al., 128(10) J. Invest. Dermatol. 2451-2457 (October 2008).

### Example 6

### Probiotic Development Utilizing the Strains Associated with Healthy Skin in Topical Creams, Solutions, and the Like for Cosmetic and Other Products

[0285] RT6 is mostly found in healthy skin. These strains can be used as probiotics in topical products for acne prevention and treatment. Four RT6 strains, including HL110PA3, HL110PA4, HL042PA3, and HL202PA1, were isolated and sequenced.

[0286] In addition, bacterial culture supernatant and/or cell lysate, including bacterial metabolites, can be used in creams, solutions, and other cosmetic products to prevent the growth of strains associated with acne. Sequences sharing at least 95% homology with SEQ ID NOs 51-54 may be used for the development of probiotics and the like.

### Example 7

### Drug Development Targeting Specific Strains that are Associated with Acne

[0287] Identification of the Core and Non-Core Regions of P. acnes

[0288] The “core” genome regions of P. acnes were defined as genome sequences that are present in all of the 82 genomes, while the “non-core” regions were defined as genome sequences that are NOT present in all the genomes. See S. Tomida et al., Pan-genome and Comparative Genome Analyses of Propionibacterium acnes Reveal Its Genomic Diversity in the Healthy and Diseased Human Skin Microbiome (in press); see also Example 2. Non-core regions specific to strains of RTs 4 and 5, e.g., loci 1, 2, and 3, were identified, as mentioned previously. Non-core regions specific to strains of RT8 (noted as Locus 4) were also identified as well as several other strains such as HL078PA1, HL030PA2, HL063PA2, P.acn17, HL097PA1, and PRP38. See FIG. 20. The genomic sequence of Locus 4 is set forth as SEQ ID NO:18. The genes in loci 1-4 below (Tables 4-1, 4-2, and 4-3) that are mostly unique to acne associated strains RT4, RT5, and RT8 are listed below. Non-core sequences are also set forth. The genes encoded in these loci are drug targets.

TABLE 4-1
List of genes encoded in loci 1 and 2, specific to RT4 and 5

| Locus in | | |
|---|---|---|
| FIG. 3a | ID | Description |
| Locus 1 | GM131 | ABC transporter ATP-binding protein |
| Locus 1 | GM132/ | Site-specific recombinase |
| | GM133*² | |
| Locus 1 | GM134 | Site-specific recombinase |
| Locus 1 | GM135 | Hypothetical protein |
| Locus 1 | GM136 | Hypothetical protein |
| Locus 1 | GM137 | N-acetylmuramoyl-L-alanine amidase |
| Locus 2 | GM171 | Hypothetical protein |
| Locus 2 | GM172 | Hypothetical protein |
| Locus 2 | GM173 | Single-strand binding family protein |
| Locus 2 | GM174 | CobQ/CobB/MinD/ParA nucleotide binding |
| | | domain protein |
| Locus 2 | GM175 | Hypothetical protein |
| Locus 2 | GM176 | Hypothetical protein |
| Locus 2 | GM177 | Hypothetical protein |
| Locus 2 | GM178 | Hypothetical protein |
| Locus 2 | GM179 | Hypothetical protein |
| Locus 2 | GM180 | Hypothetical protein |
| Locus 2 | GM181 | CAAX amino protease family protein |
| Locus 2 | GM182 | Hypothetical protein |
| Locus 2 | GM183 | YcaO-like protein |
| Locus 2 | GM184 | Hypothetical protein |
| Locus 2 | GM185 | SagB-type dehydrogenase domain protein |
| Locus 2 | GM186 | Hypothetical protein |
| Locus 2 | GM187 | ABC transporter, ATP-binding protein |
| Locus 2 | GM188 | ABC-2 type transporter |
| Locus 2 | GM189 | Hypothetical protein |
| Locus 2 | GM196 | Hypothetical protein |

TABLE 4-2
List of genes encoded in Locus 3, a linear plasmid and specific to RT4 and 5

| Locus | ID | Description |
|---|---|---|
| Locus 3 | PAGK_2319 | hypothetical protein |
| Locus 3 | PAGK_2320 | hypothetical protein |
| Locus 3 | PAGK_2321 | hypothetical protein |
| Locus 3 | PAGK_2322 | plasmid stabilization system protein |
| Locus 3 | PAGK_2323 | hypothetical protein |
| Locus 3 | PAGK_2324 | hypothetical protein |
| Locus 3 | PAGK_2325 | hypothetical protein |
| Locus 3 | PAGK_2326 | CobQ/CobB/MinD/ParA nuclcotide binding domain |
| Locus 3 | PAGK_2327 | hypothetical protein |
| Locus 3 | PAGK_2328 | hypothetical protein |
| Locus 3 | PAGK_2329 | hypothetical protein |
| Locus 3 | PAGK_2330 | hypothetical protein |
| Locus 3 | PAGK_2331 | hypothetical protein (similar to PPA1279) |
| Locus 3 | PAGK_2332 | plasmid partition protein ParA |
| Locus 3 | PAGK_2333 | hypothetical protein |
| Locus 3 | PAGK_2334 | hypothetical protein |
| Locus 3 | PAGK_2335 | hypothetical protein |
| Locus 3 | PAGK_2336 | putative ribbon-helix-helix protein, copG family |
| Locus 3 | PAGK_2337 | putative ribonuclease E |
| Locus 3 | PAGK_2338 | hypothetical protein (similar to PPA1294) |
| Locus 3 | PAGK_2339 | hypothetical protein (similar to PPA1295) |
| Locus 3 | PAGK_2340 | putative permease |
| Locus 3 | PAGK_2341 | hypothetical protein (similar to PPA1297) |
| Locus 3 | PAGK_2342 | hypothetical protein (similar to PPA1298) |
| Locus 3 | PAGK_2343 | hypothetical protein (similar to PPA1299) |
| Locus 3 | PAGK_2344 | hypothetical protein (similar to CLOLEP_00122) |
| Locus 3 | PAGK_2345 | hypothetical protein (similar to CLOLEP_00123) |
| Locus 3 | PAGK_2346 | hypothetical protein (similar to CLOLEP_00124) |
| Locus 3 | PAGK_2347 | hypothetical protein (similar to CLOLEP_00125) |
| Locus 3 | PAGK_2348 | hypothetical protein (similar to CLOLEP_00126) |
| Locus 3 | PAGK_2349 | hypothetical protein (similar to CLOLEP_00127) |
| Locus 3 | PAGK_2350 | hypothetical protein |
| Locus 3 | PAGK_2351 | hypothetical protein (similar to CLOLEP_00129) |
| Locus 3 | PAGK_2352 | hypothetical protein (similar to CLOLEP_00130) |
| Locus 3 | PAGK_2353 | hypothetical protein (similar to CLOLEP_00131) |
| Locus 3 | PAGK_2354 | hypothetical protein (similar to CLOLEP_00132) |
| Locus 3 | PAGK_2355 | hypothetical protein (similar to CLOLEP_00134) |
| Locus 3 | PAGK_2356 | hypothetical protein (similar to CLOLEP_00135) |
| Locus 3 | PAGK_2357 | hypothetical protein (similar to CLOLEP_00141) |
| Locus 3 | PAGK_2358 | hypothetical protein (similar to CLOLEP_00142) |
| Locus 3 | PAGK_2359 | hypothetical protein (similar to CLOLEP_00143) |
| Locus 3 | PAGK_2360 | hypothetical protein (similar to CLOLEP_00144, RcpC) |
| Locus 3 | PAGK_2361 | hypothetical protein (similar to CLOLEP_00145, TadZ) |
| Locus 3 | PAGK_2362 | hypothetical protein (similar to CLOLEP_00146, TadA) |
| Locus 3 | PAGK_2363 | hypothetical protein (similar to CLOLEP_00147, TadB) |
| Locus 3 | PAGK_2364 | hypothetical protein (similar to CLOLEP_00148, TadC) |
| Locus 3 | PAGK_2365 | hypothetical protein (similar to CLOLEP_00149, Flp-1) |
| Locus 3 | PAGK_2366 | hypothetical protein (similar to CLOLEP_00151, TadE) |
| Locus 3 | PAGK_2367 | hypothetical protein (similar to CLOLEP_00152, TadE) |
| Locus 3 | PAGK_2368 | hypothetical protein (similar to CLOLEP_00153, TadE) |
| Locus 3 | PAGK_2369 | hypothetical protein (similar to CLOLEP_00154) |
| Locus 3 | PAGK_2370 | hypothetical protein (similar to CLOLEP_00157) |
| Locus 3 | PAGK_2371 | hypothetical protein (similar to CLOLEP_00158) |
| Locus 3 | PAGK_2372 | hypothetical protein (similar to CLOLEP_00159) |
| Locus 3 | PAGK_2373 | hypothetical protein (similar to CLOLEP_00160) |
| Locus 3 | PAGK_2374 | hypothetical protein |
| Locus 3 | PAGK_2375 | hypothetical protein (similar to CLOLEP_00162) |
| Locus 3 | PAGK_2376 | hypothetical protein (similar to CLOLEP_00163) |
| Locus 3 | PAGK_2377 | hypothetical protein (similar to CLOLEP_00164) |
| Locus 3 | PAGK_2378 | hypothetical protein (similar to CLOLEP_00166) |
| Locus 3 | PAGK_2379 | repA |
| Locus 3 | PAGK_2380 | CobQ/CobB/MinD/ParA nuclsotide binding domain |
| Locus 3 | PAGK_2381 | hypothetical protein |
| Locus 3 | PAGK_2382 | hypothetical protein |
| Locus 3 | PAGK_2383 | Yag1E |
| Locus 3 | PAGK_2384 | hypothetical protein |
| Locus 3 | PAGK_2385 | hypothetical protein |
| Locus 3 | PAGK_2386 | hypothetical protein |
| Locus 3 | PAGK_2387 | hypothetical protein |
| Locus 3 | PAGK_2388 | hypothetical protein |
| Locus 3 | PAGK_2389 | hypothetical protein |
| Locus 3 | PAGK_2390 | hypothetical protein |
| Locus 3 | PAGK_2391 | hypothetical protein |
| Locus 3 | PAGK_2392 | ResA |

TABLE 4-3
List of genes encoded in Locus 4, RT8 specific region

| Locus | ID | Description |
|---|---|---|
| Locus 4 | HMPREF9576_00292 | tRNA adenylyltransferase |
| Locus 4 | HMPREF9576_00293 | conserved hypothetical protein |
| Locus 4 | HMPREF9576_00294 | conserved domain protein |
| Locus 4 | HMPREF9576_00295 | response regulator receiver domain protein |
| Locus 4 | HMPREF9576_00296 | histidine kinase |
| Locus 4 | HMPREF9576_00297 | hypothetical protein |
| Locus 4 | HMPREF9576_00298 | hypothetical protein |
| Locus 4 | HMPREF9576_00299 | hypothetical protein |
| Locus 4 | HMPREF9576_00300 | hypothetical protein |
| Locus 4 | HMPREF9576_00301 | hypothetical protein |
| Locus 4 | HMPREF9576_00302 | drug resistance MFS transporter, drug: H+ antiporter-2 |
| | | (14 Spanner) (DHA2) family protein |
| Locus 4 | HMPREF9576_00303 | hypothetical protein |
| Locus 4 | HMPREF9576_00304 | conserved domain protein |
| Locus 4 | HMPREF9576_00305 | beta-ketoacyl synthase, N-terminal domain protein |
| Locus 4 | HMPREF9576_00306 | hypothetical protein |
| Locus 4 | HMPREF9576_00307 | acetyltransferase, GNAT family |
| Locus 4 | HMPREF9576_00308 | putative (3R)-hydroxymyristoyl-ACP dehydratase |
| Locus 4 | HMPREF9576_00309 | putative acyl carrier protein |
| Locus 4 | HMPREF9576_00310 | putative 3-ketoacyl-(acyl-carrier-protein) reductase |
| Locus 4 | HMPREF9576_00311 | ornithine cyclodeaminase/mu-crystallin family protein |
| Locus 4 | HMPREF9576_00312 | pyridoxal-phosphate dependent enzyme |
| Locus 4 | HMPREF9576_00313 | lantibiotic dehydratase, C-terminus |
| Locus 4 | HMPREF9576_00314 | aminotransferase, class I/II |
| Locus 4 | HMPREF9576_00315 | acyl carrier domain protein |
| Locus 4 | HMPREF9576_00316 | AMP-binding enzyme |
| Locus 4 | HMPREF9576_00317 | malonyl CoA-acyl carrier protein transacylase family protein |
| Locus 4 | HMPREF9576_00318 | ABC-2 type transporter |
| Locus 4 | HMPREF9576_00319 | ABC transporter, ATP-binding protein |
| Locus 4 | HMPREF9576_00320 | hypothetical protein |

### Example 8

### Targeted Phage Therapy

[0289] Bacteriophages play an important role in regulating the composition and dynamics of microbial communities, including the human skin microbiota. Bacteriophages of Propionibacterium acnes, a major skin commensal, were previously isolated and used as a typing system to distinguish different serotypes of P. acnes. However, molecular characterization of these phages had been lacking. Recent efforts in genome sequencing have improved our understanding of P. acnes phages and their interactions with bacterial hosts.

[0290] Bacteriophages are the most abundant organisms on earth (Mc Grath & van Sinderen, 2007) and are believed to outnumber bacteria by 10:1 in many diverse ecosystems (Rohwer, 2003). As important components of microbial communities, bacteriophages are a reservoir of diversity-generating elements (Rohwer & Thurber, 2009) and regulate both the abundances (Suttle, Chan, & Cottrell, 1990) and diversity of microbial hosts by predation (Rodriguez-Valera et al., 2009). The human skin is inhabited by hundreds of microbial species, including bacteria, fungi, and viruses (Grice & Segre, 2011). The homeostasis of this ecosystem is important to its function as a barrier against the invasion and colonization of pathogens on the skin. However, much remains to be learned about the nature and driving forces of the dynamics among the microorganisms in the skin microbial community. In particular, the relative abundances and interactions between bacteriophages and their bacterial hosts on the skin remained to be elucidated.

[0291] The microbial community in the pilosebaceous unit of the skin is dominated by Propionibacterium acnes, which accounts for approximately 90% of the microbiota (“(Nature Precedings Paper),” n.d.). P. acnes has been suggested as a pathogenic factor in the development of acne vulgaris (Bojar & Holland, 2004; Leyden, 2001), one of the most common human skin diseases. Above-detailed studies classified P. acnes strains into ribotypes (RT) based on their 16S ribosomal RNA (rRNA) sequences, and demonstrated that P. acnes strain population structure in pilosebaceous units differs between healthy skin and acne affected skin.

[0292] P. acnes bacteriophages exist on the human skin. In 1968, Zierdt at al. (Zierdt, Webster, & Rude, 1968) isolated such a phage, named phage 174, from spontaneous plaques of a P. acnes isolate (at the time known as Corynebacterium acnes). Phage 174 was able to lyse nearly all P. acnes strains tested in the study [10]. Subsequently, more P. acnes phages were isolated which exhibited varied life cycles that range from lytic to temperate [11, 12]. However, in the last decades, the study of P. acnes bacteriophages had been limited to the development of phage typing systems to distinguish the different serotypes of P. acnes [13, 14]_ENREF_{—}4, and extensive molecular characterization of the phages has been lacking.

[0293] Recent genomic sequencing of P. acnes bacteriophages (Farrar et al., 2007; Lood & Collin, 2011; Marinelli et al., 2012) have provided new insight into P. acnes phage diversity. P. acnes phages are similar to mycobacteriophages both morphologically and genetically, but have a much smaller genome. Currently 14 phage genome sequences are available. Sequencing additional phage isolates is needed to further characterize the diversity. Despite these recent sequencing efforts, the genome-level diversity of P. acnes phages in the human skin microbiome and their interactions with P. acnes and other Propionibacteria remain to be elucidated. P. acnes phages have diverse host specificities among different lineages of P. acnes strains [14]. Phage host specificity is important in determining how these phages regulate the composition and dynamics of P. acnes populations in the community. On the other hand, certain P. acnes strains may also influence phage populations through their anti-viral mechanisms, such as the bacterial immune system based on the transcription of clustered, regularly-interspaced short, palindromic repeat (CRISPR) sequence arrays. The CRISPR arrays contain oligonucleotide ‘spacers’ derived from phage DNA or plasmid DNA. In a manner analogous to RNA interference, the transcribed, single-stranded CRISPR RNA elements interact with CRISPR-associated (Cas) proteins to direct the degradation of DNA targets containing complementary ‘protospacer’ sequences from foreign DNA [16]. While characterizing the genome diversity of P. acnes, Applicants discovered that P. acnes strains of RT2 and RT6 harbor CRISPR arrays. The CRISPR mechanism may play a role in defending against phage or plasmid invasion.

[0294] To better understand the interactions between bacteria and bacteriophages in the human skin microbiome and their contributions to skin health and disease, the diversity and host specificity of P. acnes phages isolated from acne patients and healthy individuals was investigated. The genomes of 15 phage isolates were investigated and screened against a panel of 69 sequenced Propionibacteria strains to determine their host range and specificity.

### Phage Isolation and General Genome Features

[0295] To characterize the genetic diversity and the abundance of P. acnes phages in the skin microbiome, 203 skin samples of pilosebaceous units from 179 individuals were collected, including 109 samples from normal individuals and 94 from acne patients. All of the samples were cultured for P. acnes under anaerobic conditions. Phage plaques in 49 samples were observed: 35 from normal individuals and 14 from acne patients. P. acnes phages were found more frequently in samples from normal individuals than from acne patients with statistical significance (p=0.005, Fisher's exact test). Among the 93 phage isolates that were obtained from these samples, five phages from acne patients and ten from normal individuals were selected for whole genome sequencing using 454 or IIlumina platforms (Table 3-1).

TABLE 3-1
Phage Genome Information and Sequencing Statistics

| | Genome | | Total | Total | | | Presence |
|---|---|---|---|---|---|---|---|
| | Length | | Input | Input | | Annotated | of 11-nt |
| Phage Name | (bp) | GC % | Reads | Bases | Coverage | ORFs | Overhang |
| PHL111M01 | 29,140 | 54.33 | 5,453 | 2,865,116 | 98x | 46 | yes |
| PHL060L00 | 29,514 | 54.05 | 10,000 | 12,015,904 | 407x | 47 | yes |
| PHL112N00 | 29,266 | 54.48 | 10,000 | 12,270,460 | 419x | 47 | yes |
| PHL113M01 | 29,200 | 54.10 | 4,228 | 2,237,790 | 77x | 45 | yes |
| PHL114L00 | 29,464 | 54.21 | 10,000 | 12,270,609 | 416x | 47 | yes |
| PHL010M04 | 29,511 | 53.99 | 3,185 | 1,686,535 | 57x | 46 | not |
| | | | | | | | verified |
| PHL066M04 | 29,512 | 53.99 | 4,478 | 2,364,379 | 80x | 46 | yes |
| PHL073M02 | 29,503 | 53.99 | 4,700 | 2,529,669 | 86x | 46 | not |
| | | | | | | | verified |
| PHL071N05 | 29,467 | 53.92 | 6,143 | 3,059,098 | 104x | 46 | not |
| | | | | | | | verified |
| PHL067M10 | 29,377 | 54.26 | 4,486 | 2,313,471 | 79x | 46 | yes |
| PHL115M02 | 29,453 | 53.82 | 8,914 | 4,687,391 | 159x | 46 | yes |
| PHL085M01 | 29,451 | 53.82 | 10,000 | 12,552,610 | 426x | 46 | yes |
| PHL037M02 | 29,443 | 53.78 | 5,895 | 3,093,818 | 105x | 46 | yes |
| PHL085N00* | 29,454 | 53.83 | 20,000 | 3,904,239 | 133 | 45 | yes |
| PHL082M00* | 29,491 | 54.38 | 20,000 | 3,289,741 | 112 | 44 | yes |
| Average | 29,383 | 54.05 | 6,729 | 5,688,219 | 193.37 | 46 | |

*sequenced on the Illumina MiSeq platform. All other genomes were sequenced on the 454 platform

[0296] All phage genomes were assembled, completed, and annotated (FIG. 29). The genomes of these 15 phages have comparable sizes (29.1-29.5 Kb) and GC content (53.8-54.5%), similar to the published P. acne phage genomes. On average, 44 open reading frames (ORFs) were predicted in each genome. Consistent with the genome organization previously reported [11, 15], the ORFs were arranged compactly within the left and right arm regions of each genome. The left arm and right arm of the genomes can be distinguished by their opposite directions of transcription. The sequence identity between any pair of genomes is moderately high, ranging from 78.2 to 99.9% (Table 3-1).

P. acnes Phages are Diverse with Subgroups of Highly Related Strains with Distinct Sites of Genetic Variations

[0297] To investigate the genome diversity of P. acnes phages, all 29 sequenced phage genomes were compared, including Applicants' 15 phage genomes and the 14 published ones (Farrar et al., 2007; Lood & Collin, 2011; Marinelli et al., 2012). The core genomic regions shared by all 29 genomes have a combined length of 24,475 by (83% of the average genome length) and contain 6,812 single-nucleotide polymorphisms (SNPs). A phylogenetic tree constructed from these 6,812 SNPs (FIG. 30) shows that most of the phage genomes isolated from all studies to date show comparable divergence from each other with an average distance of 0.301 (substitution rate at the SNP sites). However, also found were two groups of phages, named as Group I and Group II (FIG. 30), that are closely related with much shorter phylogenetic distances. The same results were obtained when the entire genome sequences (including core and non-core regions) were used in the calculation of phylogenetic relationships (FIG. 31).

[0298] We next determined whether the newly-sequenced phages belong to the phylogenetic groups discovered before. Lood et al. previously surveyed the phylogenetic diversity of P. acnes phages based on the nucleotide sequences encoding head proteins or amidases of phage isolates [12]. Three major phylogenetic groups were reported. Applicants' data were combined with the data from Lood et al. and Applicants reconstructed the phylogenetic trees of head protein and amidase gene sequences. The updated phylogenetic trees reproduced the relationships among the strains from the previous study (FIG. 32). However, Applicants' phages were grouped into separate clades. Moreover, by including the gene sequences from the current study, the longest phylogenetic distance among all studied phages was increased from 0.077 to 0.102 for the head protein gene and from 0.140 to 0.182 for the amidase gene. Although these distances are still considerably shorter than those of the closest outgroups (0.939, head protein from mycobacteriophage Che9d; 0.764, P. acnes KPA171202 amidase) [12], the analysis suggests that P. acnes phage diversity is broader than previously described.

[0299] Some of the P. acnes phages appear to be closely related strains as previously shown [12]. Among the 29 sequenced genomes, two groups of closely related strains were observed (FIG. 30). Group I consists of PHL066M04, PHL010M04, and PHL073M02, which are separated by an average phylogenetic distance of 0.002 at the genome level. Group II consists of PHL085M01, PHL085N00, PHL115M02, and PHL037M02, with an average phylogenetic distance of 0.004. These two groups are statistically robust when core regions or the entire genome or only the left-arm or rightarm coding regions were used in calculating the phylogeny (FIGS. 30 and 31).

[0300] Whether the genetic variations among Group I phages or Group II phages were located in particular regions of the genomes was investigated. The sites of sequence variation among Group I phages lie primarily within the region encoding a putataive type II holin and a peptidoglycan amidase (Gp20 and Gp21 as annotated in PA6, FIG. 33). These endolysins permeabilize the membrane and degrade the extracellular peptidoglycan layer to release new phage particles from the bacterial host. The majority of the sequence variations in these two genes among the Group I phage genomes are mostly synonymous and do not appear to affect the functions of the proteins. The genomes of PHL010M02 and PHL066M02 differ at only 11 sites, 9 of which occur in predicted coding regions.

[0301] Genetic variations among Group II members reside in a region encoding homologs of Gp16, Gp17, and Gp18 in PA6 (FIG. 33). These proteins' location near the 3′ end of the left arm between structural proteins and lysis proteins suggests that they may be late-acting genes involved in viral protein processing and packaging.

Alternative Annotations of P. acnes Phage Genomes

[0302] The large number of newly-sequenced P. acnes phage strains provided an opportunity to validate and refine initial annotations of the P. acnes phage genomes. Based on the analysis, several alternative annotations of the phage genomes were confirmed.

[0303] All 15 phage genomes that were sequenced support an alternative annotation of the Gp22/23 locus, which was previously annotated as two ORFs, Gp22 and Gp23, encoded on the plus-strand in the PA6 genome. Homologs of the PA6 genes Gp22 and Gp23 were not consistently identified in the genomes, as many of the homologs have inconsistent start and stop codon positions at the expected plus-strand locations of these genes. However, on the minus-strand, all genomes appear to encode a single ORF with a length of 513-522 bp. This annotation is consistent with the annotation reported by Marinelli et al. (Marinelli et al., 2012), which is referred to herein as Gp22/23 (FIG. 29). While no known function was assigned to Gp22 or Gp23 of the original plus-strand annotation, the minus-strand annotation of Gp22/23 in PHL112N00 and PHL111M01 showed modest similarity to a zinc finger protein from Arthroderma gypseum (E-values 1.0e-4 and 5.7e-4, respectively). The PHL111M01 annotation also showed similarity to a polyprenyl diphosphate synthase from Streptomyces albus (E-value 2.6e-5) and a polyketide synthase from the Frankia genus (E-value 2.5e-4). The minus-strand Gp22/23 ORFs from most genomes are homologs of each other, except those in PHL067M10 and PHL114L00. The Gp22/23 ORFs in these two genomes form a separate group and share little nucleotide similarity to the other Gp22/23 ORFs despite being present at the same locus in the genome. The observation that this ORF appears in all the phage genomes on the minus strand suggests that this region may be part of the right arm. This is consistent with previous reports of a plus-strand transcriptional terminator that separates Gp22/23 from the rest of the left arm in PA6, PAD20, and PAS50 [11].

[0304] Homologs of the PA6 ORFs Gp42, Gp45, and Gp46, which occur in the right-arm of the genome near the ˜1 kb non-coding region, were not consistently identified. The expected locations of each of these right-arm ORFs in the phage genomes frequently contained numerous stop codons and showed limited homology to corresponding regions of the PA6 genome. This is consistent with the generally high degree of nucleotide variation near the non-coding region and suggests that these ORFs may represent genes that are differentially present among different phage strains.

[0305] The sequencing data demonstrated that the ends of the phage genomes are flanked by 11-nucleotide single-stranded overhangs (Table 3-1). In the sequencing data of 10 phage genomes, 1-3 reads that span both the 3′ and 5′ ends of the genomes were found. The genome ends in these reads are consistently separated by a sequence that matches the 11-nt single-stranded extension previously reported (Marinelli et al., 2012). However, based on the sequencing data, the presence of overhangs in three of the 15 genomes: PHL010M04, PHL073M02, and PHL071N05, were not shown. It is possible that they were simply not detected, as overhang-containing reads were rarely observed in general (2.3 overhang reads per 10,000 reads). Nevertheless, the data do suggest that the phage DNA could be circularized at some point in their life cycle, as previously proposed [11]. The absence of the overhang sequence in reads that map to only one end of the genome may be an artifact of sample processing, as T4 DNA polymerase is used to ‘polish’ fragmented library DNA by digesting 3′ single-strand extensions and extending the complement of 5′ single-strand extensions (Roche Diagnostics, 2009). If so, it is surmisable that the overhang may exist on the 3′ ends of the genome.

Host Range and Specificity of P. acnes Phages

[0306] To investigate the host range and specificity of P. acnes phages, the sequenced phages were screened against a panel of 69 Propionibacterium strains, including 65 P. acnes strains, three P. humerusii strains, and one P. granulosum strain. Except for the P. acnes strains KPA171202 and ATCC11828, all of these Propionibacterium strains were isolated from the same cohort of subjects sampled for phages. The genomes of all 65 P. acnes strains and three P. humerusii strains were sequenced. A phylogenetic tree of the 65 P. acnes strains based on the SNPs in their core genomic regions was constructed (FIG. 33, left dendrogram). Based on the previously established typing of P. acnes strains by their RecA gene sequences [7], the bacterial collection included all major lineages of P. acnes found on the human skin, with multiple strains representing each type: IA-1, IA-2, IB-1, IB-2, IB-3 and II. The susceptibility/resistance of each of the 69 bacterial strains against each of our 15 sequenced phages was determined using a crossstreak method. In total, 1,035 bacterium-phage interactions were determined. Each experiment was repeated at least five times. For the bacterial strains that showed resistance to phages, the fold changes in efficiency of plaquing (EOP) was determined relative to the P. acnes strain ATCC6919, which is known to be susceptible to all tested strains.

[0307] It was found that the susceptibility/resistance to phage is correlated with the P. acnes lineages. Five of the 69 Propionibacterium strains showed a 100-fold or greater increase in resistance against at least one phage. P. acnes strains of types IA-1, IA-2, IB-1, and IB-2 were all susceptible to all tested phages. However, two strains of type IB-3 (KPA171202 and HL030PA1) were highly resistant to some of the phages (FIG. 34). Type IB-3 strains encode components of a type III restriction modification system (genes PPA1611 and PPA1612 in KPA171202). This may explain their resistance to phages. KPA171202 encodes a cryptic prophage in the genome [17]. However, the sequence of the prophage is not related to any of the sequenced P. acnes phages, therefore, the presence of the cryptic prophage is unlikely to explain the resistance to phages. Three type II strains were also highly resistant to some of the phages. This is consistent with previous observations that strains of this type were more frequently resistant to phages [14].

[0308] On the other hand, the susceptibility/resistance of P. acnes strains to phages did not correlate with phage lineages (r=0.1343, p-value=0.115, Mantel test). Even the host ranges among closely-related phage strains in Group I or Group II are different (FIG. 34). One example is PHL066M04, a Group I phage that showed little similarity to other phages in the same group, but had a similar bacterium-phage interaction pattern to the Group II phages PHL115M02 and PHL037M02. These results suggest that bacterial factors may play an important role in determining the phage host range and specificity.

[0309] To determine whether these phages are specific to only P. acnes or if they are capable of interacting with other Propionibacteria, included were one P. granulosum strain and three P. humerusii strains in the bacterium-phage interaction experiment. P. granulosum is a common skin commensal with approximately 1.1% abundance in the pilosebaceous unit [7]. P. humerusii is a newly-defined species [18]. In the study cohort, P. humerusii is one of the major species found on the skin with an abundance of 1.9% in the pilosebaceous unit [7]. It is closely related to P. acnes with >98% identity in the 16S rRNA gene sequence [18]. While the P. granulosum strain showed strong resistance to all the phages tested, two P. humerusii strains, HL037PA2 and HL037PA3, were susceptible to all the phages. The third P. humerusii strain, HL044PA1, was lysed by ten of the 15 phages tested. This suggests that the host range of P. acnes phages is not limited to P. acnes but also includes P. humerusii and possibly other closely-related Propionibacterium species.

Resistance to Bacteriophages does not Correlate with the Presence of Matching CRISPR Spacers in P. acnes Strains

[0310] Among the 65 P. acnes isolates, eight strains belong to RT2 and RT6 (RecA type II) and encode CRISPR/Cas genes, which function as a bacterial adaptive immune mechanism against foreign DNA. These RT2 and RT6 strains each have one to nine spacers, 33 nucleotides long, in their CRISPR arrays. In total, they encode 42 spacers, 28 of which are unique.

[0311] Whether the CRISPR/Cas mechanism can explain phage susceptibility/resistance in the RT2 and RT6 strains was investigated. Protospacers in the 15 phage genomes that match a spacer sequence from the RT2 and RT6 P. acnes strains were identified. Up to two mismatches were allowed in the sequence alignments. In all phages, protospacers that match the spacers in at least two P. acnes strains were identified (FIG. 35). These protospacers are all single-copied in the phage genomes and are located primarily on the left arm (FIG. 36). Their locations are generally conserved among all other phage genomes harboring the same protospacer sequences.

[0312] The susceptibility/resistance patterns of the eight RT2 and RT6 P. acnes strains showed little correlation with either the number of spacers in each array that had protospacer matches (r=0.207) or whether at least one match could be found against the CRISPR array in general (r=0.202). Susceptibility/resistance to phages also did not correlate with the pattern with which any specific spacer matched (maximum absolute correlation 0.051).

[0313] Phages can escape the CRISPR defense mechanism by mutating sites involved in protospacer recognition. The short nucleotide motif downstream of the protospacer, known as the protospacer-adjacent motif (PAM), is highly conserved among targets of CRISPR/Cas systems [19]. Mutations in these nucleotides have been found to disrupt CRISPR-mediated resistance despite complete complementarity in the protospacer sequence [20-22]. To determine whether the lack of correlation between bacterial susceptibility/resistance and the presence of matching spacer sequences is due to mutations within the PAM sequence, the PAMs of the nine protospacers that have exact matches to the spacer sequences encoded in HL042PA3 were examined. Six of these protospacers come from phages that HL042PA3 was resistant to, while the other three protospacers are from the phages that were able to lyse HL042PA3. Among the six protospacers, sequence conservation at several sites within their 33-nucleotide length and within the ten downstream nucleotides expected to contain the PAMs were observed (FIG. 37). This suggests that these protospacer motifs are conserved and can be targeted by HL042PA3 CRISPRs. However, these same nucleotide positions are also conserved in the three protospacers from other phages (PHL113M01, PHL112N00, and PHL085M01) that were able to lyse HL042PA3 (FIG. 37). Thus, the conservation of protospacer motifs including the PAMs cannot explain the lack of correlation between bacterial susceptibility/resistance and the presence of matching spacer sequences

[0314] In summary, the data demonstrate that encoding CRISPR spacers that match against the genome of an invading phage is not sufficient for an effective defense, suggesting that transcriptional and/or translational regulation of CRISPR RNA and Cas gene expression may also be required for CRISPR-mediated resistance. Interactions between these bacteria and phages may also depend on additional phage and bacterial components involved in phage binding, entry, replication, or release.

[0315] A diverse group of P. acnes bacteriophages that reside on the human skin has been revealed. Most of the sequenced phages show moderately high genetic similarity with certain strains forming closely-related groups. These phages show various patterns of interaction with P. acnes and P. humerusii strains, but these patterns do not correlate with phage phylogeny. It was determined that resistance or susceptibility to phages correlated well with P. acnes lineages. Types IA-1, IA-2, IB-1, and IB-2 were all susceptible to all tested phages, while certain strains of types IB-3 and II were resistant to some phages. Phage resistance in type II P. acnes strains does not correlate with the presence of CRISPR spacers that match to phage protospacers, suggesting that additional mechanisms, such as regulation of the CRISPR/Cas system and/or other antiviral mechanisms, are needed in conferring the phage resistance.

[0316] This study suggests an important regulatory role of P. acnes bacteriophages in the skin microbiome. The strain-specific host ranges demonstrate the ability of these phages to regulate particular subsets of the P. acnes population and P. humerusii population. Among these subsets of Propionibacterium populations, phages may also disseminate genes that potentially modify virulence, as suggested by Lood and Collin [11], or competitiveness, as it was suggested that gp22/23 encoded in some phages may be potentially involved in the production of polyketide antimicrobials. Both the selective lysis and modification of P. acnes strains by phages potentially regulates the relative abundances of the commensal and pathogenic strains of P. acnes on the skin. This delicate balance between commensals and pathogens can be especially important for skin health and disease at sites where P. acnes dominates. Based on the metagenomic shotgun sequencing data, it is estimated that the ratio between P. acnes phage and P. acnes in the pilosebaceous unit is 1:20 [7], which is far different from the phage:bacteria ratios estimated in environmental microbial communities, where viruses typically outnumber bacteria [23]. This suggests that the human host also plays a role in selecting and regulating the composition and diversity of the microbiome.

### Materials and Methods

### Propionibacteria Culture

[0317] P. acnes, P. humerusii, and P. granulosum strains were cultured under anaerobic conditions in Clostridial media (Oxoid) at 37° C. for 4-6 days. Propionibacterium cultures were used to prepare top agar overlays for phage culture on A media plates (12 g/L pancreatic digest of casein, 12 g/L Difco yeast extract, 22.2 mM D-glucose, 29.4 mM g/L potassium phosphate monobasic, 8 mM magnesium sulphate heptahydrate, 20 g/L Difco agar).

### Phage Isolation and DNA Extraction

[0318] Plaques found on skin sample culture plates were isolated by puncturing the agar with a pipet tip and resuspending in 50 μL SM buffer (0.1 M sodium chloride, 8 mM magnesium sulfate heptahydrate, 1M Tris-HCl, pH 7.5, 2% gelatin, 1 mM calcium chloride). The phage resuspension was spread onto A media plates with top agar containing P. acnes strain ATCC 6919. After incubation at 37° C. for 2 days, phages were eluted with 8 mL SM buffer at room temperature, filtered with 0.22 uM PES filter (Millipore), and stored at 4° C. Phage titers were determined by plaque assay.

[0319] Phage DNA extraction was performed using the Lambda Mini Kit (Qiagen) with the following modifications. Phage particles were precipitated in Buffer L2 by centrifugation at 20,000 g for 1 hour. Extracted DNA was eluted with Buffer QF and precipitated with isopropanol overnight at −20° C. before centrifugation.

### Phage Genome Sequencing and Annotation

[0320] Phage genomes were sequenced in multiplex using the Roche GS FLX Titanium or Illumina MiSeq platforms. De novo assembly of reads was performed with MIRA [24], and the resulting contigs were manually finished in Consed [25]. For phages covered by more than 20,000 reads, assembly was performed on a randomly-selected subset of 10,000 reads for 454 data or 20,000 reads for MiSeq data. Fully assembled phage genomes were annotated using Genemark.hmm [26] and Glimmer v3.02 [27].

### Genome Sequence Alignment and Phylogenetic Tree Construction

[0321] Sequences present in all 16 phage genomes were defined as core regions of the phage genome. To identify these core regions, alignments were first generated between the PA6 genome and each of the other 15 phage genomes using Nucmer [28]. This yielded 15 sets of starting and ending coordinates describing intervals within the PA6 genome that align with any given phage genome. The core regions were then calculated for all phages by determining the overlapping intervals between all of the 15 coordinate sets. The core region sequences were concatenated for the subsequent multiple sequence alignments. Single nucleotide polymorphisms (SNPs) on the core regions were identified by using the “show-snps” option of Nucmer with the default setting. Using MEGA5 [29], phylogenetic trees were constructed by the Neighbor Joining method on p-distances based on SNP sites. Bootstrapping was based on 200 replicates.

[0322] Multiple sequence alignments of full-length phage genomes, left and right arm coding regions, head protein sequences, and amidase sequences were each generated with MAFFT [30] or Muscle [31]. Phylogenetic trees were constructed in Seaview [32] based on the BioNJ method applied to the Jukes-Cantor distances between the sequences. All trees were bootstrapped for 5,000 replicates.

### Determination of Variation Sites

[0323] Multiple sequence alignments of Group I and Group II phages were generated using MAFFT [30]. In each of these alignments, the positions of all mismatches and gaps (discrepancies) were recorded relative to a reference genome that was chosen at random. Contiguous gaps in the reference genome were counted as a single discrepancy. The reference genome was divided into 50-nucleotide windows, and the discrepancy density of each sequence window was calculated as the total number of discrepancies it contained. Densities were plotted in Artemis [33].

[0324] To determine the single-nucleotide variations within each strain, all read data for each phage, including reads not initially included in the de novo genome assembly, were mapped to their corresponding genomes using Mira. as the sites in each phage genome assembly.

### Bacterial Resistance Test

[0325] The susceptibilities/resistances of Propionibacterium strains against 15 phages were determined using a modified cross-streak assay. The bacterial strains were cultured and streaked in parallel across A media plates (5-6 isolates on each plate, ˜1 cm apart, along with ATCC 6919 as a control). Approximately 5 μL of 106 pfu/mL phage suspension was applied onto each streak, and then the plates were incubated at 37° C. anaerobically for 2 days. At least five replicates of each cross-streak experiment were performed to determine whether the strains were susceptible or resistant judged based on lysis. The resistance of the bacterial strains was further quantified by assaying the efficiency of plaquing of the phages relative to P. acnes strain ATCC 6919, calculated as the following:

$$Resistance = \frac{1}{Efficiency of Plaquing} = \frac{Titer of Phage Strain X on ATCC 6919}{Titer of Phage Strain X on Bacterial Strain Y}$$

[0326] A 100-fold or greater increase in efficiency of plaquing was considered to be evidence of resistance.

### Phage Interaction Correlation

[0327] To determine whether genetically similar phages have similar host range and specificity, the correlation between their phylogenetic and phenotypic relationships was calculated, the latter based on results from the bacterial resistance test. Each column in the bacterial resistance table, which represents the host range of a given phage, was converted to binary form by assigning 1 to instances of resistance and 0 to instances of susceptibility. The Euclidean distance between each column was used to calculate a phenotype distance matrix between all phages. A phylogenetic distance matrix among the phage genomes was calculated using MEGA5 [29]. Using the ade4 package [34] in R, a Mantel test was performed on the phenotype and phylogenetic distance matrices to determine the correlation between the two. 10,000 permutations were performed.

### CRISPR Search

[0328] CRISPR spacer sequences were identified in P. acnes genomes using CRISPRfinder [35]. The extracted spacer sequences were aligned against all phage sequences using BLASTn. Protospacers with up to two mismatches were identified.

### Results

[0329] The genomes of 15 P. acnes phages isolated from human skin were sequenced. The phage genomes showed moderately high sequence similarity and were comparable in size and organization. Based on a comparison of the genomes, most phages diverge from each other, while some of them form closely-related groups that were not described previously. When tested against a panel of 69 Propionibacterium strains, these phages lysed all P. acnes strains except some strains from type IB-3 and II. Some of the phages were also able to lyse Propionibacterium humerusii strains. It was found that bacterial susceptibility/resistance to phages had no significant correlation with phage phylogeny or the presence of the CRISPR spacers in type II P. acnes strains that match the protospacers in the phage genomes.

### Conclusions

[0330] With 15 new phagel genomes, it was determined that the diversity of P. acnes phages is broader than previously described with novel groups added. The host range and specificity are different among the phages, but are not correlated with the phylogeny of phage genomes. It was also found that encoding CRISPR spacers that match to phage genomes is not sufficient to confer P. acnes resistance to phages. This study provides new insight into the potential application of phages in treating acne and other P. acnes associated diseases.

### REFERENCES CITED IN EXAMPLE 8

[0331] 1. Mc Grath S, van Sinderen D (eds): Bacteriophage: Genetics and Molecular Biology. Norfolk, UK: Caister Academic Press; 2007.
[0332] 2. Rohwer F: Global phage diversity. Cell 2003, 113:141.
[0333] 3. Rohwer F, Thurber R V: Viruses manipulate the marine environment. Nature 2009, 459:207-212.
[0334] 4. Suttle C A, Chan A M, Cottrell M T: Infection of Phytoplankton by Viruses and Reduction of Primary Productivity. Nature 1990, 347:467-469.
[0335] 5. Rodriguez-Valera F, Martin-Cuadrado A B, Rodriguez-Brito B, Pasic L, Thingstad T F, Rohwer F, Mira A: Explaining microbial population genomics through phage predation. Nature reviews Microbiology 2009, 7:828-836.
[0336] 6. Grice E A, Segre J A: The skin microbiome. Nature reviews Microbiology 2011, 9:244-253.
[0337] 7. http://precedings.nature.com/documents/5305/version/1
[0338] 8. Bojar R A, Holland K T: Acne and Propionibacterium acnes. Clin Dermatol 2004, 22:375-379.
[0339] 9. Leyden J J: The evolving role of Propionibacterium acnes in acne. Semin Cutan Med Surg 2001, 20:139-143.
[0340] 10. Zierdt C H, Webster C, Rude W S: Study of the anaerobic corynebacteria. International Journal of Systematic Bacteriology 1968, 18:33-47.
[0341] 11. Lood R, Collin M: Characterization and genome sequencing of two Propionibacterium acnes phages displaying pseudolysogeny. BMC genomics 2011, 12:198.
[0342] 12. Lood R, Morgelin M, Holmberg A, Rasmussen M, Collin M: Inducible Siphoviruses in superficial and deep tissue isolates of Propionibacterium acnes. BMC microbiology 2008, 8:139.
[0343] 13. Jong E C, Ko H L, Pulverer G: Studies on bacteriophages of Propionibacterium acnes. Med Microbiol Immunol 1975, 161:263-271.
[0344] 14. Webster G F, Cummins C S: Use of bacteriophage typing to distinguish Propionibacterium acne types I and II. Journal of clinical microbiology 1978, 7:84-90.
[0345] 15. Farrar M D, Howson K M, Bojar R A, West D, Towler J C, Parry J, Pelton K, Holland K T: Genome sequence and analysis of a Propionibacterium acnes bacteriophage. Journal of bacteriology 2007, 189:4161-4167.
[0346] 16. Horvath P, Barrangou R: CRISPR/Cas, the immune system of bacteria and archaea. Science 2010, 327:167-170.
[0347] 17. Brzuszkiewicz E, Weiner J, Wollherr A, Thurmer A, Hupeden J, Lomholt H B, Kilian M, Gottschalk G, Daniel R, Mollenkopf H J, et al: Comparative genomics and transcriptomics of Propionibacterium acnes. PloS one 2011, 6:e21581.
[0348] 18. Butler-Wu S M, Sengupta D J, Kittichotirat W, Matsen F A, 3rd, Bumgarner R E: Genome sequence of a novel species, Propionibacterium humerusii. Journal of bacteriology 2011, 193:3678.
[0349] 19. Mojica F J, Diez-Villasenor C, Garcia-Martinez J, Almendros C: Short motif sequences determine the targets of the prokaryotic CRISPR defence system. Microbiology 2009, 155:733-740.
[0350] 20. Westra E R, van Erp P B, Kunne T, Wong S P, Staals R H, Seegers C L, Bollen S, Jore M M, Semenova E, Severinov K, et al: CRISPR immunity relies on the consecutive binding and degradation of negatively supercoiled invader DNA by Cascade and Cas3. Molecular cell 2012, 46:595-605.
[0351] 21. Semenova E, Jore M M, Datsenko K A, Semenova A, Westra E R, Wanner B, van der Oost J, Brouns S J, Severinov K: Interference by clustered regularly interspaced short palindromic repeat (CRISPR) RNA is governed by a seed sequence. Proceedings of the National Academy of Sciences of the United States of America 2011, 108:10098-10103.
[0352] 22. Semenova E, Nagornykh M, Pyatnitskiy M, Artamonova, II, Severinov K: Analysis of CRISPR system function in plant pathogen Xanthomonas oryzae. FEMS microbiology letters 2009, 296:110-116.
[0353] 23. Srinivasiah S, Bhaysar J, Thapar K, Liles M, Schoenfeld T, Wommack K E: Phages across the biosphere: contrasts of viruses in soil and aquatic environments. Research in microbiology 2008, 159:349-357.
[0354] 24. Chevreux B, Pfisterer T, Drescher B, Driesel A J, Muller W E, Wetter T, Suhai S: Using the miraEST assembler for reliable and automated mRNA transcript assembly and SNP detection in sequenced ESTs. Genome research 2004, 14:1147-1159.
[0355] 25. Gordon D, Abajian C, Green P: Consed: a graphical tool for sequence finishing. Genome research 1998, 8:195-202.
[0356] 26. Lukashin A V, Borodovsky M: GeneMark.hmm: new solutions for gene finding. Nucleic acids research 1998, 26:1107-1115.
[0357] 27. Delcher A L, Harmon D, Kasif S, White O, Salzberg S L: Improved microbial gene identification with GLIMMER. Nucleic acids research 1999, 27:4636-4641.
[0358] 28. Kurtz S, Phillippy A, Delcher A L, Smoot M, Shumway M, Antonescu C, Salzberg S L: Versatile and open software for comparing large genomes. Genome biology 2004, 5:R12.
[0359] 29. Tamura K, Peterson D, Peterson N, Stecher G, Nei M, Kumar S: MEGA5: molecular evolutionary genetics analysis using maximum likelihood, evolutionary distance, and maximum parsimony methods. Molecular biology and evolution 2011, 28:2731-2739.
[0360] 30. Katoh K, Misawa K, Kuma K, Miyata T: MAFFT: a novel method for rapid multiple sequence alignment based on fast Fourier transform. Nucleic acids research 2002, 30:3059-3066.
[0361] 31. Edgar R C: MUSCLE: multiple sequence alignment with high accuracy and high throughput. Nucleic acids research 2004, 32:1792-1797.
[0362] 32. Gouy M, Guindon S, Gascuel O: SeaView version 4: A multiplatform graphical user interface for sequence alignment and phylogenetic tree building. Molecular biology and evolution 2010, 27:221-224.
[0363] 33. Rutherford K, Parkhill J, Crook J, Horsnell T, Rice P, Rajandream M A, Barrell B: Artemis: sequence visualization and annotation. Bioinformatics 2000, 16:944-945.
[0364] 34. Dray S, Dufour A B: The ade4 package: Implementing the duality diagram for ecologists. Journal of Statistical Software 2007, 22:1-20.
[0365] 35. Grissa I, Vergnaud G, Pourcel C: CRISPRFinder: a web tool to identify clustered regularly interspaced short palindromic repeats. Nucleic acids research 2007, 35:W52-57.
[0366] (Nature Precedings Paper). (n.d.). Retrieved from http://precedings.nature.com/documents/5305/version/1
[0367] Bojar, R. a, & Holland, K. T. (2004). Acne and Propionibacterium acnes. Clinics in dermatology, 22(5), 375-9. doi:10.1016/j.clindermato1.2004.03.005
[0368] Farrar, M. D., Howson, K. M., Bojar, R. a, West, D., Towler, J. C., Parry, J., Pelton, K., et al. (2007). Genome sequence and analysis of a Propionibacterium acnes bacteriophage. Journal of bacteriology, 189(11), 4161-7. doi:10.1128/JB.00106-07
[0369] Grice, E. a, & Segre, J. a. (2011). The skin microbiome. Nature reviews. Microbiology, 9(4), 244-53. doi:10.1038/nrmicro2537
[0370] Leyden, J. J. (2001). The evolving role of Propionibacterium acnes in acne. Seminars in cutaneous medicine and surgery, 20(3), 139-43. doi:10.1053/sder.2001.28207
[0371] Lood, R., & Collin, M. (2011). Characterization and genome sequencing of two Propionibacterium acnes phages displaying pseudolysogeny. BMC genomics, 12(1), 198. doi:10.1186/1471-2164-12-198
[0372] Marinelli, L. J., Fitz-gibbon, S., Hayes, C., Bowman, C., Inkeles, M., Loncaric, A., & Russell, D. A. (2012). Propionibacterium acnes Bacteriophages Display Limited Genetic Diversity and Broad Killing Activity against Bacterial Skin Isolates. mBio, 3(5), 1-13. doi:10.1128/mBio.00279-12. Editor
[0373] Mc Grath, S., & van Sinderen, D. (eds). (2007). Bacteriophage: Genetics and Molecular Biology. Norfolk, UK: Caister Academic Press.
[0374] Roche Diagnostics. (2009). GS FLX Titanium General Library Preparation Method Manual. Mannheim: Roche Diagnostics GmbH.
[0375] Rodriguez-Valera, F., Martin-Cuadrado, A.-B., Rodriguez-Brito, B., Pasio, L., Thingstad, T. F., Rohwer, F., & Mira, A. (2009). Explaining microbial population genomics through phage predation. Nature reviews. Microbiology, 7(11), 828-36. doi:10.1038/nrmicro2235
[0376] Rohwer, F. (2003). Global phage diversity. Cell, 113(2), 141.
[0377] Zierdt, C. H., Webster, C., & Rude, W. S. (1968). Study of the anaerobic corynebacteria. International Journal of Systematic Bacteriology, 18, 33-47.

[0378] All the strains of RT4, RT5, and RT8 show sensitivity to all of the phages shown in Table 5. Therefore, acne patients may be treated with phage by using phage strains that are listed in Table 5:

TABLE 5
Host range and specificity of P. acnes phages

| | RerA | | CRIS P./ | | | | |
|---|---|---|---|---|---|---|---|
| | Type | Ribotype | Cas | PHL113M01 | PHL111M01 | PHL082M00 | PHL050L00 |
| HL036PA1 | IA | 537 | − | S | S | S | S |
| HL036PA2 | | 532 | − | S | S | S | S |
| HL036PA3 | | 1 | − | S | S | S | S |
| HL046PA2 | | 1 | − | S | S | S | S |
| HL002PA3 | | 1 | − | S | S | S | S |
| HL002PA2 | | 1 | − | S | S | S | S |
| HL005PA2 | | 1 | − | S | S | S | S |
| HL005PA3 | | 1 | − | S | S | S | S |
| HL020PA1 | | 1 | − | S | S | S | S |
| HL027PA2 | | 1 | − | S | S | S | S |
| HL100PA1 | | 1 | − | S | S | S | S |
| HL087PA2 | | 1 | − | S | S | S | S |
| HL013PA2 | | 1 | − | S | S | S | S |
| HL063PA1 | | 1 | − | S | S | S | S |
| HL072PA1 | | 5 | − | S | S | S | S |
| HL072PA2 | | 5 | − | S | S | S | S |
| HL106PA2 | | 1 | − | S | S | S | S |
| HL099PA1 | | 4 | − | S | S | S | S |
| HL083PA1 | | 1 | − | S | S | S | S |
| HL038PA1 | | 4 | − | S | S | S | S |
| HL074PA1 | | 4 | − | S | S | S | S |
| HL005PA1 | | 4 | − | S | S | S | S |
| HL056PA1 | | 4 | − | S | S | S | S |
| HL053PA1 | | 4 | − | S | S | S | S |
| HL045PA1 | | 4 | − | S | S | S | S |
| HL007PA1 | | 4 | − | S | S | S | S |
| HL096PA1 | | 5 | − | S | S | S | S |
| HL043PA1 | | 5 | − | S | S | S | S |
| HL043PA2 | | 5 | − | S | S | S | S |
| HL078PA1 | | 1 | − | S | S | S | S |
| HL086PA1 | IB | 8 | − | S | S | S | S |
| HL082PA1 | | 8 | − | S | S | S | S |
| HL110PA2 | | 8 | − | S | S | S | S |
| HL053PA3 | | 8 | − | S | S | S | S |
| HL092PA1 | | 8 | − | S | S | S | S |
| HL110PA1 | | 8 | − | S | S | S | S |
| HL025PA1 | | 1 | − | S | S | S | S |
| HL030PA2 | | 3 | − | S | S | S | S |
| HL063PA2 | | 3 | − | S | S | S | S |
| HL037PA1 | | 3 | − | S | S | S | S |
| HL059PA1 | | 16 | − | S | S | S | S |
| HL059PA2 | | 16 | − | S | S | S | S |
| HL025PA2 | | 3 | − | S | S | S | S |
| HL005PA4 | | 3 | − | S | S | S | S |
| HL067PA1 | | 3 | − | S | S | S | S |
| HL002PA1 | | 3 | − | S | S | S | S |
| HL027PA1 | | 3 | − | S | S | S | S |
| HL046PA1 | | 3 | − | S | S | S | S |
| HL083PA2 | | 3 | − | S | S | S | S |
| HL013PA1 | | 3 | − | S | S | S | S |
| HL050PA1 | | 3 | − | S | S | S | S |
| HL050PA3 | | 3 | − | S | S | S | S |
| HL087PA1 | | 3 | − | S | S | S | S |
| HL087PA3 | | 3 | − | S | S | S | S |
| KPA171202 | | 1 | − | S | >10⁴ | S | >10⁴ |
| HL030PA1 | | 1 | − | >10⁴ | S | S | S |
| HL050PA2 | II | 1 | − | S | S | S | S |
| HL060PA1 | | 2 | + | S | S | S | S |
| HL082PA2 | | 2 | + | S | S | S | S |
| HL001PA1 | | 2 | + | S | >10⁷ | S | S |
| HL106PA1 | | 2 | + | S | S | S | S |
| ATCC 11828 | | 2 | + | S | S | S | S |
| HL110PA3 | | 6 | + | S | S | S | S |
| HL110PA4 | | 6 | + | S | S | S | S |
| HL042PA3 | | 6 | + | S | >10⁶ | >10⁶ | S |
| HL037PA2 | — | P. humerusii | − | S | S | S | S |
| HL037PA3 | | P. humerusii | − | S | S | S | S |
| HL044PA1 | | P. humerusii | − | S | S | S | >10³ |
| HL078PG1 | — | P. granulosum | | >10⁷ | >10⁷ | >10⁷ | >10⁷ |

| | RerA | | | | | | |
|---|---|---|---|---|---|---|---|
| | Type | PHL057M10 | PHL071N05 | PHL112N00 | PHL037202 | PHL085M00 | PHL115M02 |
| HL036PA1 | IA | S | S | S | S | S | S |
| HL036PA2 | | S | S | S | S | S | S |
| HL036PA3 | | S | S | S | S | S | S |
| HL046PA2 | | S | S | S | S | S | S |
| HL002PA3 | | S | S | S | S | S | S |
| HL002PA2 | | S | S | S | S | S | S |
| HL005PA2 | | S | S | S | S | S | S |
| HL005PA3 | | S | S | S | S | S | S |
| HL020PA1 | | S | S | S | S | S | S |
| HL027PA2 | | S | S | S | S | S | S |
| HL100PA1 | | S | S | S | S | S | S |
| HL087PA2 | | S | S | S | S | S | S |
| HL013PA2 | | S | S | S | S | S | S |
| HL063PA1 | | S | S | S | S | S | S |
| HL072PA1 | | S | S | S | S | S | S |
| HL072PA2 | | S | S | S | S | S | S |
| HL106PA2 | | S | S | S | S | S | S |
| HL099PA1 | | S | S | S | S | S | S |
| HL083PA1 | | S | S | S | S | S | S |
| HL038PA1 | | S | S | S | S | S | S |
| HL074PA1 | | S | S | S | S | S | S |
| HL005PA1 | | S | S | S | S | S | S |
| HL056PA1 | | S | S | S | S | S | S |
| HL053PA1 | | S | S | S | S | S | S |
| HL045PA1 | | S | S | S | S | S | S |
| HL007PA1 | | S | S | S | S | S | S |
| HL096PA1 | | S | S | S | S | S | S |
| HL043PA1 | | S | S | S | S | S | S |
| HL043PA2 | | S | S | S | S | S | S |
| HL078PA1 | | S | S | S | S | S | S |
| HL086PA1 | IB | S | S | S | S | S | S |
| HL082PA1 | | S | S | S | S | S | S |
| HL110PA2 | | S | S | S | S | S | S |
| HL053PA3 | | S | S | S | S | S | S |
| HL092PA1 | | S | S | S | S | S | S |
| HL110PA1 | | S | S | S | S | S | S |
| HL025PA1 | | S | S | S | S | S | S |
| HL030PA2 | | S | S | S | S | S | S |
| HL063PA2 | | S | S | S | S | S | S |
| HL037PA1 | | S | S | S | S | S | S |
| HL059PA1 | | S | S | S | S | S | S |
| HL059PA2 | | S | S | S | S | S | S |
| HL025PA2 | | S | S | S | S | S | S |
| HL005PA4 | | S | S | S | S | S | S |
| HL067PA1 | | S | S | S | S | S | S |
| HL002PA1 | | S | S | S | S | S | S |
| HL027PA1 | | S | S | S | S | S | S |
| HL046PA1 | | S | S | S | S | S | S |
| HL083PA2 | | S | S | S | S | S | S |
| HL013PA1 | | S | S | S | S | S | S |
| HL050PA1 | | S | S | S | S | S | S |
| HL050PA3 | | S | S | S | S | S | S |
| HL087PA1 | | S | S | S | S | S | S |
| HL087PA3 | | S | S | S | S | S | S |
| KPA171202 | | >10⁵ | S | >10⁷ | >10³ | >10⁴ | >10⁴ |
| HL030PA1 | | >10² | S | >10³ | >10³ | >10³ | >10³ |
| HL050PA2 | II | >10⁴ | S | S | S | S | S |
| HL060PA1 | | S | S | S | S | S | S |
| HL082PA2 | | S | S | S | S | S | S |
| HL001PA1 | | >10⁷ | S | S | S | S | S |
| HL106PA1 | | S | S | S | S | S | S |
| ATCC 11828 | | S | S | S | S | S | S |
| HL110PA3 | | S | S | S | S | S | S |
| HL110PA4 | | S | S | S | S | S | S |
| HL042PA3 | | >10⁷ | >10⁵ | S | >10⁷ | >10⁶ | >10⁷ |
| HL037PA2 | — | S | S | S | S | S | S |
| HL037PA3 | | S | S | S | S | S | S |
| HL044PA1 | | S | S | >10⁴ | >10³ | S | >10² |
| HL078PG1 | — | >10⁷ | >10⁷ | >10⁷ | >10⁷ | >10⁷ | >10⁷ |

| | RerA | | | | | |
|---|---|---|---|---|---|---|
| | Type | PHL085M01 | PHL114L00 | PHL073M02 | PHL010M04 | PHL066M04 |
| HL036PA1 | IA | S | S | S | S | S |
| HL036PA2 | | S | S | S | S | S |
| HL036PA3 | | S | S | S | S | S |
| HL046PA2 | | S | S | S | S | S |
| HL002PA3 | | S | S | S | S | S |
| HL002PA2 | | S | S | S | S | S |
| HL005PA2 | | S | S | S | S | S |
| HL005PA3 | | S | S | S | S | S |
| HL020PA1 | | S | S | S | S | S |
| HL027PA2 | | S | S | S | S | S |
| HL100PA1 | | S | S | S | S | S |
| HL087PA2 | | S | S | S | S | S |
| HL013PA2 | | S | S | S | S | S |
| HL063PA1 | | S | S | S | S | S |
| HL072PA1 | | S | S | S | S | S |
| HL072PA2 | | S | S | S | S | S |
| HL106PA2 | | S | S | S | S | S |
| HL099PA1 | | S | S | S | S | S |
| HL083PA1 | | S | S | S | S | S |
| HL038PA1 | | S | S | S | S | S |
| HL074PA1 | | S | S | S | S | S |
| HL005PA1 | | S | S | S | S | S |
| HL056PA1 | | S | S | S | S | S |
| HL053PA1 | | S | S | S | S | S |
| HL045PA1 | | S | S | S | S | S |
| HL007PA1 | | S | S | S | S | S |
| HL096PA1 | | S | S | S | S | S |
| HL043PA1 | | S | S | S | S | S |
| HL043PA2 | | S | S | S | S | S |
| HL078PA1 | | S | S | S | S | S |
| HL086PA1 | IB | S | S | S | S | S |
| HL082PA1 | | S | S | S | S | S |
| HL110PA2 | | S | S | S | S | S |
| HL053PA3 | | S | S | S | S | S |
| HL092PA1 | | S | S | S | S | S |
| HL110PA1 | | S | S | S | S | S |
| HL025PA1 | | S | S | S | S | S |
| HL030PA2 | | S | S | S | S | S |
| HL063PA2 | | S | S | S | S | S |
| HL037PA1 | | S | S | S | S | S |
| HL059PA1 | | S | S | S | S | S |
| HL059PA2 | | S | S | S | S | S |
| HL025PA2 | | S | S | S | S | S |
| HL005PA4 | | S | S | S | S | S |
| HL067PA1 | | S | S | S | S | S |
| HL002PA1 | | S | S | S | S | S |
| HL027PA1 | | S | S | S | S | S |
| HL046PA1 | | S | S | S | S | S |
| HL083PA2 | | S | S | S | S | S |
| HL013PA1 | | S | S | S | S | S |
| HL050PA1 | | S | S | S | S | S |
| HL050PA3 | | S | S | S | S | S |
| HL087PA1 | | S | S | S | S | S |
| HL087PA3 | | S | S | S | S | S |
| KPA171202 | | >10⁴ | >10⁴ | >10⁴ | >10⁵ | >10⁷ |
| HL030PA1 | | >10² | >10³ | >10⁴ | >10⁵ | >10⁴ |
| HL050PA2 | II | S | S | S | S | S |
| HL060PA1 | | S | S | S | S | S |
| HL082PA2 | | S | S | S | S | S |
| HL001PA1 | | S | >10⁶ | S | S | S |
| HL106PA1 | | S | S | S | S | S |
| ATCC 11828 | | S | S | S | S | S |
| HL110PA3 | | S | S | S | S | S |
| HL110PA4 | | S | S | S | S | S |
| HL042PA3 | | S | >10⁷ | >10⁷ | >10⁷ | >10⁷ |
| HL037PA2 | — | S | S | S | S | S |
| HL037PA3 | | S | S | S | S | S |
| HL044PA1 | | S | S | S | S | >10² |
| HL078PG1 | — | >10⁷ | >10⁷ | >10⁷ | >10⁷ | >10⁷ |

S susceptible
10 [symbol] fold increase in resistance [symbol]
indicates data missing or illegible when filed

[0379] Strains in the IB-3 lineage show resistance against most of the tested phages. Therefore, patients with those strains may not benefit as much from phage therapy. SEQ ID NOs 55-81 include four unique genomic sequences for strains in the IB-3 lineage and for several other strains, such as IB-3-s1 (IB-3 and SK187), IB-3-s2 (IB-3 and HL025PA1), IB-3-s3 (IB-3 and HL201PA1), IB-3-s4 (IB-3 and HL201PA1). The sequence similarities range from 95% to 100%. Primers targeting these sequences can be used to estimate and predict the effectiveness of phage therapy.

[0380] FIG. 26 shows the phylogenetic tree of the 32 phages including the 18 sequenced phages. There are phage strains highly similar to each other, such as the ones in Groups I and II. This suggests that the same phages can be found in different individuals and supports that a particular phage strain can be used as a common treatment agent for different individuals. SEQ ID NOs 33-50 reflect the genome sequences of the 18 sequenced phages, including the 15 phages shown in Table 5.

Potential Therapeutic Phage for Patients with Microbiome Type I Include:

[0381] PHL113M01, PHL111M01, PHL082M00, PHL060L00, PHL067M10, PHL071N05, PHL112N00, PHL037M02, PHL085N00, PHL115M02, PHL085M01, PHL114L00, PHL073M02, PHL010M04, and PHL066M04.

Potential Therapeutic Phage for Patients with Microbiome Type I with IB-3 Strain Include:

[0382] PHL082M00 and PHL071N05.

Potential Therapeutic Phage for Patients with Microbiome Type II Include:

[0383] PHL113M01, PHL060L00, PHL112N00, and PHL085M01.

Potential Therapeutic Phage for Patients with Microbiome Type III or Dominant RT8 Include:

[0384] PHL113M01, PHL111M01, PHL082M00, PHL060L00, PHL067M10, PHL071N05, PHL112N00, PHL037M02, PHL085N00, PHL115M02, PHL085M01, PHL114L00, PHL073M02, PHL010M04, and PHL066M04.

Potential Therapeutic Phage for Patients with Microbiome Type IV Include:

[0385] PHL113M01, PHL111M01, PHL082M00, PHL060L00, PHL067M10, PHL071N05, PHL112N00, PHL037M02, PHL085N00, PHL115M02, PHL085M01, PHL114L00, PHL073M02, PHL010M04, and PHL066M04.

Potential Therapeutic Phage for Patients with Microbiome Type V Include:

[0386] PHL113M01, PHL111M01, PHL082M00, PHL060L00, PHL067M10, PHL071N05, PHL112N00, PHL037M02, PHL085N00, PHL115M02, PHL085M01, PHL114L00, PHL073M02, PHL010M04, and PHL066M04.

Specific Interactions Between Propionibacterium humerusii and P. acnes Phages

[0387] Some of the P. acnes phage strains can lyse a closely related Propionibacterium species, P. humerusii, which has been hypothesized to be associated with infection in prostheses. P. acnes phage strains that can lyse P. humerusii strains can be potentially used as a therapeutic agent for P. humerusii associated diseases.

Potential Therapeutic Phage for P. humerusii Associated Diseases Include:

[0388] PHL113M01, PHL111M01, PHL082M00, PHL067M10, PHL071N05, PHL085N00, PHL085M01, PHL114L00, PHL073M02, and PHL010M04.

ORFs in Phage Genomes that Show Identity of 85% or Less to their PA6 Homolog

| | | percent | |
|---|---|---|---|
| | nucleotide | difference | |
| phage_gene name | differences | relative to PA6 | PA6 ORF length |
| PA6_gp10 | | | 372 |
| PHL111M01_gp9 | 6 | 0.849462366 | |
| PHL112N00_gp9 | 60 | 0.838709677 | |
| PHL114L00_gp10 | 60 | 0.838709677 | |
| PHL010M04_gp11 | 56 | 0.849462366 | |
| PHL082M00_gp10 | 60 | 0.838709677 | |
| PA6_gp19 | | | 747 |
| PHL114L00_gp19 | 120 | 0.83935743 | |
| PHL010M04_gp20 | 138 | 0.815261044 | |
| PHL066M04_gp20 | 138 | 0.815261044 | |
| PHL073M02_gp20 | 138 | 0.815261044 | |
| PA6_gp44 | | | 309 |
| PHL060L00_gp47 | 83 | 0.731391586 | |
| PHL010M04_gp43 | 75 | 0.757281553 | |
| PHL066M04_gp43 | 74 | 0.760517799 | |
| PHL073M02_gp43 | 74 | 0.760517799 | |
| PHL067M10_gp43 | 74 | 0.760517799 | |
| PHL082M00_gp43 | 66 | 0.786407767 | |
| PA6_gp33 | | | 357 |
| PHL115M02_gp37 | 54 | 0.848733496 | |
| PHL085M01_gp32 | 54 | 0.848739496 | |
| PHL037M02_gp31 | 54 | 0.848739496 | |
| PHL085N00_gp32 | 54 | 0.848739496 | |
| PA6_gp45 | | | 183 |
| PHL111M01_gp44. | 33 | 0.819672131 | |
| PA6_gp21 | | | 402 |
| PHL112N00_gp20 | 71 | 0.823383085 | |
| PHL010M04_gp22 | 85 | 0.788557214 | |
| PHL066M04_gp22 | 84 | 0.791044776 | |
| PHL073M02_gp22 | 78 | 0.805970149 | |
| PBL071N05_gp21 | 61 | 0.848258706 | |
| PHL067M10_gp22 | 63 | 0.843283582 | |
| PHL115M02_gp26. | 65 | 0.838308458 | |
| PHL085M01_gp22 | 65 | 0.838308458 | |
| PHL037M02_gp21 | 65 | 0.838308458 | |
| PHL085N00_gp22 | 65 | 0.838308458 | |
| PA6_gp40 | | | 228 |
| PHL111M01_gp41 | 37 | 0.837719298 | |
| PHL060L00_gp42 | 37 | 0.837719298 | |
| PHL112N00_gp39 | 54 | 0.763157895 | |
| PHL113M01_gp43 | 38 | 0.833333333 | |
| PHL114L00_gp40 | 40 | 0.824561404 | |
| PHL010M04_gp40 | 50 | 0.780701754 | |
| PHL066M04_gp40 | 50 | 0.780701754 | |
| PHL073M02_gp40 | 50 | 0.780701754 | |
| PHL071N05_gp39 | 39 | 0.828947368 | |
| PHL067M10_gp40 | 37 | 0.837719298 | |
| PHL115M02_gp45 | 43 | 0.811403509 | |
| PHL085M01_gp40 | 43 | 0.811403509 | |
| PHL037M02_gp39 | 43 | 0.811403509 | |
| PHL085N00_gp40 | 43 | 0.811403509 | |
| PHL082M00_gp39 | 42 | 0.815789474 | |
| PA6_gp22_23 | | | 504 |
| PHL114L00_gp22 | 187 | 0.628968254 | |
| PHL010M04_gp23 | 110 | 0.781746032 | |
| PHL066M04_gp23 | 110 | 0.781746032 | |
| PHL073M02_gp23 | 110 | 0.781746032 | |
| PHL067M10_gp23 | 186 | 0.630952381 | |
| PA6_gp29 | | | 567 |
| PHL060L00_gp30 | 88 | 0.844797178 | |
| PHL112N00_gp27 | 105 | 0.814814815 | |
| PHL114L00_gp28 | 98 | 0.827160494 | |
| PA6_gp35 | | | 471 |
| PHL114L00_gp33 | 76 | 0.838641189 | |
| PA6_gp41 | | | 540 |
| PHL111M01_gp42 | 109 | 0.798148148 | |
| PHL060L00_gp43 | 104 | 0.807407407 | |
| PHL112N00_gp40 | 118 | 0.781481481 | |
| PHL113M01_gp44 | 107 | 0.801851852 | |
| PHL114L00_gp41 | 124 | 0.77037037 | |
| PHL071N05_gp40 | 110 | 0.796296296 | |
| PHL067M10_gp41 | 119 | 0.77962963 | |
| PHL115M02_gp46 | 112 | 0.792592593 | |
| PHL085M01_gp41 | 112 | 0.792592593 | |
| PHL037M02_gp40 | 112 | 0.792592593 | |
| PHL085N00_gp41 | 112 | 0.792592593 | |
| PHL082M00_gp40 | 111 | 0.794444444 | |
| PA6_gp47 | | | 180 |
| PHL115M02_gp50 | 35 | 0.805555556 | |
| PHL085M01_gp45 | 35 | 0.805555556 | |
| PHL037M02_gp44 | 35 | 0.805555556 | |
| PHL111M01_gp45 | 43 | 0.761111111 | |
| PHL071N05_gp44.1 | 32 | 0.822222222 | |
| PHL114L00_gp45.1 | 38 | 0.788888889 | |
| PHL113M01_gp47 | 31 | 0.827777778 | |
| PHL085N00_gp45 | 35 | 0.805555556 | |
| PA6_gp24 | | | 393 |
| PHL114L00_gp23 | 75 | 0.809160305 | |
| PHL010M04_gp24 | 66 | 0.832061069 | |
| PHL066M04_gp24 | 66 | 0.832061069 | |
| PHL073M02_gp24 | 66 | 0.832061069 | |
| PHL067M10_gp24 | 61 | 0.844783715 | |
| PHL115M02_gp29 | 65 | 0.834605598 | |
| PHL085M01_gp24 | 65 | 0.834605598 | |
| PHL037M02_gp23 | 65 | 0.834605598 | |
| PHL085N00_gp24 | 65 | 0.834605598 | |
| PA6_gp30 | | | 564 |
| PHL111M01_gp29 | 115 | 0.796099291 | |
| PHL113M01_gp31 | 105 | 0.813829787 | |
| PHL082M00_gp29 | 116 | 0.794326241 | |
| PA6_gp18 | | | 264 |
| PHL112N00_gp17 | 40 | 0.848484848 | |
| PHL082M00_gp18 | 41 | 0.84469697 | |
| PA6_gp37 | | | 948 |
| PHL112N00_gp34 | 168 | 0.82278481 | |
| PHL114L00_gp35 | 163 | 0.828059072 | |
| PA6_gp36 | | | 411 |
| PHL111M01_gp36 | 80 | 0.805352798 | |
| PHL112N00_gp33 | 76 | 0.815085158 | |
| PHL113M01_gp38 | 82 | 0.800486618 | |
| PHL114L00_gp34 | 86 | 0.790754258 | |
| PHL010M04_gp35 | 82 | 0.800486618 | |
| PHL066M04_gp35 | 82 | 0.800486618 | |
| PHL073M02_gp35 | 82 | 0.800486618 | |
| PHL071N05_gp34 | 82 | 0.800486618 | |
| PHL115M02_gp40 | 68 | 0.834549878 | |
| PHL085M01_gp35 | 68 | 0.834549878 | |
| PHL037M02_gp34 | 68 | 0.834549878 | |
| PHL085N00_gp35 | 68 | 0.834549878 | |
| PHL082M00_gp34 | 85 | 0.793187348 | |

### Example 9

### Drug Development

[0389] Based on the foregoing, it is now known that some P. acnes strains are associated with acne. Therefore, at the time of diagnosis, it will be useful for dermatologists to know which strains are dominant on the skin of the patient. In order to do this, at first one needs to extract bacterial DNA from the skin sample of the patient. The method/kit to isolate bacterial DNA from the skin for downstream analysis detailed above can be implemented in practice. After bacterial DNA is extracted, the fast and accurate detection/diagnosis method/kit to identify the microbiome type of the patients, detailed above, can be implemented for diagnosis. Once the microbiome type of the patient is diagnosed, several approaches can be used to treat the patient.

[0390] For example, if the patient has microbiome types IV or V, or is dominated by P. acnes RT10 strains, it is less likely antibiotic treatment would succeed, because these strains are antibiotic resistant. These patients should be treated using other therapies, such as retinoids or the methods. In the case that the patient has the virulent ribotypes, including RT4, RT5, and RT8, drugs targeting specifically to RT4, RT5, and RT8, can be used. For example, small molecules, antisense molecules, siRNA, biologics, antibodies, or combinations thereof targeting the genetic elements and biological pathways unique to the P. acnes strains associated with acne, detailed above, can be used.

### 10

### Additional Therapies

[0391] In the case that the dominant P. acnes strains in the patient do not harbor a set of CRISPR/Cas, additional treatment of phage therapy based on the foregoing can be used. For example, bacteriophage-based strain-specific therapy to treat acne can be employed. An alternative treatment strategy is to balance the relative abundance of the P. acnes strains by promoting the growth of health-associated strains. The strains associated with health can be used as probiotics. These can be topical creams, solutions, or other cosmetic products.

[0392] For prevention purposes, vaccine can be developed against virulent strains of P. acnes.

[0393] Longitudinal studies determine whether the microbiome types change over time and whether certain strains persist on subjects after treatment.

[0394] Inoculation experiments, inoculating virulent and healthy strains, determine whether P. acnes strain population changes.

[0395] Specific interactions between P. acnes strains and phages may be studied.

[0396] Immune responses in human cells against different strains of P. acnes may also be measured.

[0397] The following publications are incorporated herein by reference in their entireties for all purposes, as are all other publications referenced herein and the Sequence Listing:

[0398] E. Grice et al., 324 Science 1190-1192 (2009).

The application's sequence listing, which the Patent Office published only in electronic form, follows.

SEQUENCE LISTING (434 sequences)

SEQ ID NO: 1 - DNA, 1504 bp, Propionibacterium acnes
acgaacgctggcggcgtgcttaacacatgcaagtcgaacggaaaggccctgcttttgtggggtgctcgagtggcgaacgggtgagtaacacgtgagtaacctgcccttgactttgggataacttcaggaaactggggctaataccggataggagctcctgctgcatggtgggggttggaaagtttcggcggttggggatggactcgcggcttatcagcttgttggtggggtagtggcttaccaaggctttgacgggtagccggcctgagagggtgaccggccacattgggactgagatacggcccagactcctacgggaggcagcagtggggaatattgcacaatgggcggaagcctgatgcagcaacgccgcgtgcgggatgacggccttcgggttgtaaaccgctttcgcctgtgacgaagcgtgagtgacggtaatgggtaaagaagcaccggctaactacgtgccagcagccgcggtgatacgtagggtgcgagcgttgtccggatttattgggcgtaaagggctcgtaggtggttgatcgcgtcggaagtgtaatcttggggcttaaccctgagcgtgctttcgatacgggttgacttgaggaaggtaggggagaatggaattcctggtggagcggtggaatgcgcagatatcaggaggaacaccagtggcgaaggcggttctctgggcctttcctgacgctgaggagcgaaagcgtggggagcgaacaggcttagataccctggtagtccacgctgtaaacggtgggtactaggtgtggggtccattccacgggttccgtgccgtagctaacgctttaagtaccccgcctggggagtacggccgcaaggctaaaactcaaaggaattgacggggccccgcacaagcggcggagcatgcggattaattcgatgcaacgcgtagaaccttacctgggtttgacatggatcgggagtgctcagagatgggtgtgcctcttttggggtcggttcacaggtggtgcatggctgtcgtcagctcgtgtcgtgagatgttgggttaagtcccgcaacgagcgcaacccttgttcactgttgccagcacgttatggtggggactcagtggagaccgccggggtcaactcggaggaaggtggggatgacgtcaagtcatcatgccccttatgtccagggcttcacgcatgctacaatggctggtacagagagtggcgagcctgtgagggtgagcgaatctcggaaagccggtctcagttcggattggggtctgcaactcgacctcatgaagtcggagtcgctagtaatcgcagatcagcaacgctgcggtgaatacgttcccggggcttgtacacaccgcccgtcaagtcatgaaagttggtaacacccgaagccggtggcctaaccgttgtgggggagccgtcgaaggtgggactggtgattaggactaagtcgtaacaaggtagccgtaccggaaggtgcggctggatcacctcctttctaagga

SEQ ID NO: 2 - DNA, 1504 bp, Propionibacterium acnes
acgaacgctggcggcgtgcttaacacatgcaagtcgaacggaaaggccctgcttttgtggggtgctcgagtggcgaacgggtgagtaacacgtgagtaacctgcccttgactttgggataacttcaggaaactggggctaataccggataggagctcctgctgcatggtgggggttggaaagtttcggcggttggggatggactcgcggcttatcagcttgttggtggggtagtggcttaccaaggctttgacgggtagccggcctgagagggtgaccggccacattgggactgagatacggcccagactcctacgggaggcagcagtggggaatattgcacaatgggcggaagcctgatgcagcaacgccgcgtgcgggatgacggccttcgggttgtaaaccgctttcgcctgtgacgaagcgtgagtgacggtaatgggtaaagaagcaccggctaactacgtgccagcagccgcggtgatacgtagggtgcgagcgttgtccggatttattgggcgtaaagggctcgtaggtggttgatcgcgtcggaagtgtaatcttggggcttaaccctgagcgtgctttcgatacgggttgacttgaggaaggtaggggagaatggaattcctggtggagcggtggaatgcgcagatatcaggaggaacaccagtggcgaaggcggttctctgggcctttcctgacgctgaggagcgaaagcgtggggagcgaacaggcttagataccctggtagtccacgctgtaaacggtgggtactaggtgtggggtccattccacgggttccgcgccgtagctaacgctttaagtaccccgcctggggagtacggccgcaaggctaaaactcaaaggaattgacggggccccgcacaagcggcggagcatgcggattaattcgatgcaacgcgtagaaccttacctgggtttgacatggatcgggagtgctcagagatgggtgtgcctcttttggggtcggttcacaggtggtgcatggctgtcgtcagctcgtgtcgtgagatgttgggttaagtcccgcaacgagcgcaacccttgttcactgttgccagcacgttatggtggggactcagtggagaccgccggggtcaactcggaggaaggtggggatgacgtcaagtcatcatgccccttatgtccagggcttcacgcatgctacaatggctggtacagagagtggcgagcctgtgagggtgagcgaatctcggaaagccggtctcagttcggattggggtctgcaactcgacctcatgaagtcggagtcgctagtaatcgcagatcagcaacgctgcggtgaatacgttcccggggcttgtacacaccgcccgtcaagtcatgaaagttggtaacacccgaagccggtggcctaaccgttgtgggggagccgtcgaaggtgggactggtgattaggactaagtcgtaacaaggtagccgtaccggaaggtgcggctggatcacctcctttctaagga

SEQ ID NO: 3 - DNA, 1504 bp, Propionibacterium acnes
acgaacgctggcggcgtgcttaacacatgcaagtcgaacggaaaggccctgcttttgtggggtgctcgagtggcgaacgggtgagtaacacgtgagtaacctgcccttgactttgggataacttcaggaaactggggctaataccggataggagctcctgctgcatggtgggggttggaaagtttcggcggttggggatggactcgcggcttatcagcttgttggtggggtagtggcttaccaaggctttgacgggtagccggcctgagagggtgaccggccacattgggactgagatacggcccagactcctacgggaggcagcagtggggaatattgcacaatgggcggaagcctgatgcagcaacgccgcgtgcgggatgacggccttcgggttgtaaaccgctttcgcctgtgacgaagcgtgagtgacggtaatgggtaaagaagcaccggctaactacgtgccagcagccgcggtgatacgtagggtgcgagcgttgtccggatttattgggcgtaaagggctcgtaggtggttgatcgcgtcggaagtgtaatcttggggcttaaccctgagcgtgctttcgatacgggttgacttgaggaaggtaggggagaatggaattcctggtggagcggtggaatgcgcagatatcaggaggaacaccagtggcgaaggcggttctctgggcctttcctgacgctgaggagcgaaagcgtggggagcgaacaggcttagataccctggtagtccacgctgtaaacggtgggtactaggtgtggggtccattccacgggttccgtgccgtagctaacgctttaagtaccccgcctggggagtacggccgcaaggctaaaactcaaaggaattgacggggccccgcacaagcggcggagcatgcggattaattcgatgcaacgcgtagaaccttacctgggtttgacatggatcgggagcgctcagagatgggtgtgcctcttttggggtcggttcacaggtggtgcatggctgtcgtcagctcgtgtcgtgagatgttgggttaagtcccgcaacgagcgcaacccttgttcactgttgccagcacgttatggtggggactcagtggagaccgccggggtcaactcggaggaaggtggggatgacgtcaagtcatcatgccccttatgtccagggcttcacgcatgctacaatggctggtacagagagtggcgagcctgtgagggtgagcgaatctcggaaagccggtctcagttcggattggggtctgcaactcgacctcatgaagtcggagtcgctagtaatcgcagatcagcaacgctgcggtgaatacgttcccggggcttgtacacaccgcccgtcaagtcatgaaagttggtaacacccgaagccggtggcctaaccgttgtgggggagccgtcgaaggtgggactggtgattaggactaagtcgtaacaaggtagccgtaccggaaggtgcggctggatcacctcctttctaagga

SEQ ID NO: 4 - DNA, 1504 bp, Propionibacterium acnes
acgaacgctggcggcgtgcttaacacatgcaagtcgaacggaaaggccctgcttttgtggggtgctcgagtggcgaacgggtgagtaacacgtgagtaacctgcccttgactttgggataacttcaggaaactggggctaataccggataggagctcctgctgcatggtgggggttggaaagtttcggcggttggggatggactcgcggcttatcagcttgttggtggggtagtggcttaccaaggctttgacgggtagccggcctgagagggtgaccggccacattgggactgagatacggcccagactcctacgggaggcagcagtggggaatattgcacaatgggcggaagcctgatgcagcaacgccgcgtgcgggatgacggccttcgggttgtaaaccgctttcgcctgtgacgaagcgtgagtgacggtaatgggtaaagaagcaccggctaactacgtgccagcagccgcggtgatacgtagggtgcgagcgttgtccggatttattgggcgtaaagggctcgtaggtggttgatcgcgtcggaagtgtaatcttggggcttaaccctgagcgtgctttcgatacgggttgacttgaggaaggtaggggagaatggaattcctggtggagcggtggaatgcgcagatatcaggaggaacaccagtggcgaaggcggttctctgggcctttcctgacgctgaggagcgaaagcgtggggagcgaacaggcttagataccctggtagtccacgctgtaaacggtgggtactaggtgtggggtccattccacgggttccgtgccgtagctaacgctttaagtaccccgcctggggagtacggccgcaaggctaaaactcaaaggaattgacggggccccgcacaagcggcggagcatgcggattaattcgatgcaacgcgtagaaccttacctgggtttgacatggatcgggagtgctcagagatgggtgtgcctcttttggggtcggttcacaggtggtgcatgcctgtcgtcagctcgtgtcgtgagatgttgggttaagtcccgcaacgagcgcaacccttgttcactgttgccagcacgttatggtggggactcagtggagaccgccggggtcaactcggaggaaggtggggatgacgtcaagtcctcatgccccttatgtccagggcttcacgcatgctacaatggctggtacagagagtggcgagcctgtgagggtgagcgaatctcggaaagccggtctcagttcggattggggtctgcaactcgacctcatgaagtcggagtcgctagtaatcgcagatcagcaacgctgcggtgaatacgttcccggggcttgtacacaccgcccgtcaagtcatgaaagttggtaacacccgaagccggtggcctaaccgttgtgggggagccgtcgaaggtgggactggtgattaggactaagtcgtaacaaggtagccgtaccggaaggtgcggctggatcacctcctttctaagga

SEQ ID NO: 5 - DNA, 1504 bp, Propionibacterium acnes
acgaacgctggcggcgtgcttaacacatgcaagtcgaacggaaaggccctgcttttgtggggtgctcgagtggcgaacgggtgagtaacacgtgagtaacctgcccttgactttgggataacttcaggaaactggggctaataccggataggagctcctgctgcatggtgggggttggaaagtttcggcggttggggatggactcgcggcttatcagcttgttggtggggtagtggcttaccaaggctttgacgggtagccggcctgagagggtgaccggccacattgggactgagatacggcccagactcctacgggaggcagcagtggggaatattgcacaatgggcggaagcctgatgcagcaacgccgcgtgcgggatgacggccttcgggttgtaaaccgctttcgcctgtgacgaagcgtgagtgacggtaatgggtaaagaagcaccggctaactacgtgccagcagccgcggtgatacgtagggtgcgagcgttgtccggatttattgggcgtaaagggctcgtaggtggttgatcgcgtcggaagtgtaatcttggggcttaaccctgagcgtgctttcgatacgggttgacttgaggaaggtaggggagaatggaattcctggtggagcggtggaatgcgcagatatcaggaggaacaccagtggcgaaggcggttctctgggcctttcctgacgctgaggagcgaaagcgtggggagcgaacaggcttagataccctggtagtccacgctgtaaacggtgggtactaggtgtggggtccattccacgggttccgtgccgtagctaacgctttaagtaccccgcctggggagtacggccgcaaggctaaaactcaaaggaattgacggggccccgcacaagcggcggagcatgcggattaattcgatgcaacgcgtagaaccttacctgggtttgacatggatcgggagtgctcagagatgggtgtgcctcttttggggtcggttcacaggtggtgcatgcctgtcgtcagctcgtgtcgtgagatgttgggttaagtcccgcaacgagcgcaacccttgttcactgttgccagcacgttatggtggggactcagtggagaccgccggggtcaactcggaggaaggtggggatgacgtcaagtcatcatgccccttatgtccagggcttcacgcatgctacaatggctggtacagagagtggcgagcctgtgagggtgagcgaatctcggaaagccggtctcagttcggattggggtctgcaactcgacctcatgaagtcggagtcgctagtaatcgcagatcagcaacgctgcggtgaatacgttcccggggcttgtacacaccgcccgtcaagtcatgaaagttggtaacacccgaagccggtggcctaaccgttgtgggggagccgtcgaaggtgggactggtgattaggactaagtcgtaacaaggtagccgtaccggaaggtgcggctggatcacctcctttctaagga

SEQ ID NO: 6 - DNA, 1504 bp, Propionibacterium acnes
acgaacgctggcggcgtgcttaacacatgcaagtcgaacggaaaggccctgcttttgtggggtgctcgagtggcgaacgggtgagtaacacgtgagtaacctgcccttgactttgggataacttcaggaaactggggctaataccggataggagctcctgctgcatggtgggggttggaaagtttcggcggttggggatggactcgcggcttatcagcttgttggtggggtagtggcttaccaaggctttgacgggtagccggcctgagagggtgaccggccacattgggactgagatacggcccagactcctacgggaggcagcagtggggaatattgcacaatgggcggaagcctgatgcagcaacgccgcgtgcgggatgacggccttcgggttgtaaaccgctttcgcctgtgacgaagcgtgagtgacggtaatgggtaaagaagcaccggctaactacgtgccagcagccgcggtgatacgtagggtgcgagcgttgtccggatttattgggcgtaaagggctcgtaggtggttgatcgcgtcggaagtgtaatcttggggcttaaccctgagcgtgctttcgatacgggttgacttgaggaaggtaggggagaatggaattcctggtggagcggtggaatgcgcagatatcaggaggaacaccagtggcgaaggcggttctctgggcctttcctgacgctgaggagcgaaagcgtggggagcgaacaggcttagataccctggtagtccacgctgtaaacggtgggtactaggtgtggggtccattccacgggttccgcgccgtagctaacgctttaagtaccccgcctggggagtacggccgcaaggctaaaactcaaaggaattgacggggccccgcacaagcggcggagcatgcggattaattcgatgcaacgcgtagaaccttacctgggtttgacatggatcgggagtgctcagagatgggtgtgcctcttttggggtcggttcacaggtggtgcatggctgtcgtcagctcgtgtcgtgagatgttgggttaagtcccgcaacgagcgcaacccttgttcactgttgccagcacgttatggtggggactcagtggagaccgccggggtcaactcggaggaaggtggggatgacgtcaagtcatcatgccccttatgtccagggcttcacgcatgctacaatggctggtacagagagtggcgagcctgtgagggtgagcgaatctcggaaagccggtctcagttcggattggggtctgcaactcgacctcatgaagttggagtcgctagtaatcgcagatcagcaacgctgcggtgaatacgttcccggggcttgtacacaccgcccgtcaagtcatgaaagttggtaacacccgaagccggtggcctaaccgttgtgggggagccgtcgaaggtgggactggtgattaggactaagtcgtaacaaggtagccgtaccggaaggtgcggctggatcacctcctttctaagga

SEQ ID NO: 7 - DNA, 1504 bp, Propionibacterium acnes
acgaacgctggcggcgtgcttaacacatgcaagtcgaacggaaaggccctgcttttgtggggtgctcgagtggcgaacgggtgagtaacacgtgagtaacctgcccttgactttgggataacttcaggaaactggggctaataccggataggagctcctgctgcatggtgggggttggaaagtttcggcggttggggatggactcgcggcttatcagcttgttggtggggtagtggcttaccaaggctttgacgggtagccggcctgagagggtgaccggccacattgggactgagatacggcccagactcctacgggaggcagcagtggggaatattgcacaatgggcggaagcctgatgcagcaacgccgcgtgcgggatgacggccttcgggttgtaaaccgctttcgcctgtgacgaagcgtgagtgacggtaatgggtaaagaagcaccggctaactacgtgccagcagccgcagtgatacgtagggtgcgagcgttgtccggatttattgggcgtaaagggctcgtaggtggttgatcgcgtcggaagtgtaatcttggggcttaaccctgagcgtgctttcgatacgggttgacttgaggaaggtaggggagaatggaattcctggtggagcggtggaatgcgcagatatcaggaggaacaccagtggcgaaggcggttctctgggcctttcctgacgctgaggagcgaaagcgtggggagcgaacaggcttagataccctggtagtccacgctgtaaacggtgggtactaggtgtggggtccattccacgggttccgtgccgtagctaacgctttaagtaccccgcctggggagtacggccgcaaggctaaaactcaaaggaattgacggggccccgcacaagcggcggagcatgcggattaattcgatgcaacgcgtagaaccttacctgggtttgacatggatcgggagtgctcagagatgggtgtgcctcttttggggtcggttcacaggtggtgcatggctgtcgtcagctcgtgtcgtgagatgttgggttaagtcccgcaacgagcgcaacccttgttcactgttgccagcacgttatggtggggactcagtggagaccgccggggtcaactcggaggaaggtggggatgacgtcaagtcatcatgccccttatgtccagggcttcacgcatgctacaatggctggtacagagagtggcgagcctgtgagggtgagcgaatctcggaaagccggtctcagttcggattggggtctgcaactcgacctcatgaagtcggagtcgctagtaatcgcagatcagcaacgctgcggtgaatacgttcccggggcttgtacacaccgcccgtcaagtcatgaaagttggtaacacccgaagccggtggcctaaccgttgtgggggagccgtcgaaggtgggactggtgattaggactaagtcgtaacaaggtagccgtaccggaaggtgcggctggatcacctcctttctaagga

SEQ ID NO: 8 - DNA, 1504 bp, Propionibacterium acnes
acgaacgctggcggcgtgcttaacacatgcaagtcgaacggaaaggccctgcttttgtggggtgctcgagtggcgaacgggtgagtaacacgtgagtaacctgcccttgactttgggataacttcaggaaactggggctaataccggataggagctcctgctgcatggtgggggttggaaagtttcggcggttggggatggactcgcggcttatcagcttgttggtggggtagtggcttaccaaggctttgacgggtagccggcctgagagggtgaccggccacattgggactgagatacggcccagactcctacgggaggcagcagtggggaatattgcacaatgggcggaagcctgatgcagcaacgccgcgtgcgggatgacggccttcgggttgtaaaccgctttcgcctgtgacgaagcgtgagtgacggtaatgggtaaagaagcaccggctaactacgtgccagcagccgcggtgatacgtagggtgcgagcgttgtccggatttattgggcgtaaagggctcgtaggtggttgatcgcgtcggaagtgtaatcttggggcttaaccctgagcgtgctttcgatacgggttgacttgaggaaggtaggggagaatggaattcctggtggagcggtggaatgcgcagatatcaggaggaacaccagtggcgaaggcggttctctgggcctttcctgacgctgaggagcgaaagcgtggggagcgaacaggcttagataccctggtagtccacgctgtaaacggtgggtactaggtgtggggtccattccacgggttccgtgccgtagctaacgctttaagtaccccgcctggggagtacggccgcaaggctaaaactcaaaggaattgacggggccccgcacaagcggcggagcatgcggattaattcgatgcaacgcgtagaaccttacctgggtttgacatggatcggaagcgctcagagatgggtgtgcctcttttggggtcggttcacaggtggtgcatggctgtcgtcagctcgtgtcgtgagatgttgggttaagtcccgcaacgagcgcaacccttgttcactgttgccagcacgttatggtggggactcagtggagaccgccggggtcaactcggaggaaggtggggatgacgtcaagtcatcatgccccttatgtccagggcttcacgcatgctacaatggctggtacagagagtggcgagcctgtgagggtgagcgaatctcggaaagccggtctcagttcggattggggtctgcaactcgacctcatgaagtcggagtcgctagtaatcgcagatcagcaacgctgcggtgaatacgttcccggggcttgtacacaccgcccgtcaagtcatgaaagttggtaacacccgaagccggtggcctaaccgttgtgggggagccgtcgaaggtgggactggtgattaggactaagtcgtaacaaggtagccgtaccggaaggtgcggctggatcacctcctttctaagga

SEQ ID NO: 9 - DNA, 1504 bp, Propionibacterium acnes
acgaacgctggcggcgtgcttaacacatgcaagtcgaacggaaaggccctgcttttgtggggtgctcgagtggcgaacgggtgagtaacacgtgagtaacctgcccttgactttgggataacttcaggaaactggggctaataccggataggagctcctgctgcatggtgggggttggaaagtttcggcggttggggatggactcgcggcttatcagcttgttggtggggtagtggcttaccaaggctttgacgggtagccggcctgagagggtgaccggccacattgggactgagatacggcccagactcctacgggaggcagcagtggggaatattgcacaatgggcggaagcctgatgcagcaacgccgcgtgcgggatgacggccttcgggttgtaaaccgctttcgcctgtgacgaagcgtgagtgacggtaatgggtaaagaagcaccggctaactacgtgccagcagccgcggtgatacgtagggtgcgagcgttgtccggatttattgggcgtaaagggctcgtaggtggttgatcgcgtcggaagtgtaatcttggggcttaaccctgagcgtgctttcgatacgggttgacttgaggaaggtaggggagaatggaattcctggtggagcggtggaatgcgcagatatcaggaggaacaccagtggcgaaggcggttctctgggcctttcctgacgctgaggagcgaaagcgtggggagcgaacaggcttagataccctggtagtccacgctgtaaacggtgggtactaggtgtggggtccattccacgggttccgtgccgtagctaacgctttaagtaccccgcctggggagtacggccgcaaggctaaaactcaaaggaattgacggggccccgcacaagcggcggagcatgcggattaattcgatgcaacgcgtagaaccttacctgggtttgacatggatcgggagtgctcagagatgggtgtgcctcttttggggtcggttcacaggtggtgcatggctgtcgtcagctcgtgtcgtgagatgttgggttaagtcccgcaacgagcgcaacccttgttcactgttgccagcacgttatggtggggactcagtggagaccgccggggtcaactcggaggaaggtggggatgacgtcaagtcatcatgccccttatgtccagggcttcacgcatgctacaatggctggtacagagagtggcgagcctgtaagggtgagcgaatctcggaaagccggtctcagttcggattggggtctgcaactcgacctcatgaagtcggagtcgctagtaatcgcagatcagcaacgctgcggtgaatacgttcccggggcttgtacacaccgcccgtcaagtcatgaaagttggtaacacccgaagccggtggcctaaccgttgtgggggagccgtcgaaggtgggactggtgattaggactaagtcgtaacaaggtagccgtaccggaaggtgcggctggatcacctcctttctaagga

SEQ ID NO: 10 - DNA, 1504 bp, Propionibacterium acnes
acgaacgctggcggcgtgcttaacacatgcaagtcgaacggaaaggccctgcttttgtggggtgctcgagtggcgaacgggtgagtaacacgtgagtaacctgcccttgactttgggataacttcaggaaactggggctaataccggataggagctcctgctgcatggtgggggttggaaagtttcggcggttggggatggactcgcggcttatcagcttgttggtggggtagtggcttaccaaggctttgacgggtagccggcctgagagggtgaccggccacattgggactgagatacggcccagactcctacgggaggcagcagtggggaatattgcacaatgggcggaagcctgatgcagcaacgccgcgtgcgggatgacggccttcgggttgtaaaccgctttcgcctgtgacgaagcgtgagtgacggtaatgggtaaagaagcaccggctaactacgtgccagcagccgcggtgatacgtagggtgcgagcgttgcccggatttattgggcgtaaagggctcgtaggtggttgatcgcgtcggaagtgtaatcttggggcttaaccctgagcgtgctttcgatacgggttgacttgaggaaggtaggggagaatggaattcctggtggagcggtggaatgcgcagatatcaggaggaacaccagtggcgaaggcggttctctgggcctttcctgacgctgaggagcgaaagcgtggggagcgaacaggcttagataccctggtagtccacgctgtaaacggtgggtactaggtgtggggtccattccacgggttccgtgccgtagctaacgctttaagtaccccgcctggggagtacggccgcaaggctaaaactcaaaggaattgacggggccccgcacaagcggcggagcatgcggattaattcgatgcaacgcgtagaaccttacctgggtttgacatggatcgggagtgctcagagatgggtgtgcctcttttggggtcggttcacaggtggtgcatgcctgtcgtcagctcgtgtcgtgagatgttgggttaagtcccgcaacgagcgcaacccttgttcactgttgccagcacgttatggtggggactcagtggagaccgccggggtcaactcggaggaaggtggggatgacgtcaagtcatcatgccccttatgtccagggcttcacgcatgctacaatggctggtacagagagtggcgagcctgtgagggtgagcgaatctcggaaagccggtctcagttcggattggggtctgcaactcgacctcatgaagtcggagtcgctagtaatcgcagatcagcaacgctgcggtgaatacgttcccggggcttgtacacaccgcccgtcaagtcatgaaagttggtaacacccgaagccggtggcctaaccgttgtgggggagccgtcgaaggtgggactggtgattaggactaagtcgtaacaaggtagccgtaccggaaggtgcggctggatcacctcctttctaagga

SEQ ID NO: 11 - DNA, 20 bp, Artificial Sequence
  Primer/probe sequence
ggtatccaccgagatggaag

SEQ ID NO: 12 - DNA, 20 bp, Artificial Sequence
  Primer/probe sequence
gtggtcccaggtgacattct

SEQ ID NO: 13 - DNA, 20 bp, Artificial Sequence
  Primer/probe sequence
cgacatcgacgtttcatctg

SEQ ID NO: 14 - DNA, 20 bp, Artificial Sequence
  Primer/probe sequence
gtgttctcctcgtgctggtt

SEQ ID NO: 15 - DNA, 21 bp, Artificial Sequence
  Primer/probe sequence
gataatccgttcgacaagctg

SEQ ID NO: 16 - DNA, 19 bp, Artificial Sequence
  Primer/probe sequence
acccaccacgatgatgttt

SEQ ID NO: 17 - DNA, 21 bp, Artificial Sequence
  Primer/probe sequence
gaagaatcccgctccatttcc

SEQ ID NO: 18 - DNA, 20 bp, Artificial Sequence
  Primer/probe sequence
cctttcttgtagccgagcag

SEQ ID NO: 19 - DNA, 25 bp, Artificial Sequence
  Primer/probe sequence
attgtcacctgggaccaccgtaaac

SEQ ID NO: 20 - DNA, 20 bp, Artificial Sequence
  Primer/probe sequence
cgtgatcctgatcgactgtg

SEQ ID NO: 21 - DNA, 19 bp, Artificial Sequence
  Primer/probe sequence
gctccacaacttcgagtgc

SEQ ID NO: 22 - DNA, 22 bp, Artificial Sequence
  Primer/probe sequence
caggccgttgatcgtgagctga

SEQ ID NO: 23 - DNA, 20 bp, Artificial Sequence
  Primer/probe sequence
tgctgataatccgttcgaca

SEQ ID NO: 24 - DNA, 20 bp, Artificial Sequence
  Primer/probe sequence
acgacgtcgaaaacaactcc

SEQ ID NO: 25 - DNA, 22 bp, Artificial Sequence
  Primer/probe sequence
ctctaccgaagctcttgccgca

SEQ ID NO: 26 - DNA, 19 bp, Artificial Sequence
  Primer/probe sequence
atcgccgtcgacaggtagt

SEQ ID NO: 27 - DNA, 19 bp, Artificial Sequence
  Primer/probe sequence
ccgagattctgcgcctagt

SEQ ID NO: 28 - DNA, 21 bp, Artificial Sequence
  Primer/probe sequence
cggtgcccttgctgaggtaca

SEQ ID NO: 29 - DNA, 6363 bp, Propionibacterium acnes
gtgttgtggactctcggggtcagtctgtccgctcacttgagatggcttaacatttctgaccgacgccgaagtctacgaacgctgcgaaacgccaaccgacgcctttgtaaccaagccttcttcatcaagatctacatcgacgaagacgaccaactccgcgtcgagaacaaccgacctttcgaaatgctcctcgaccctcagatcaacgccaacgccctcacctgggcccagaacggcaacaaggcccgaatcgaaactaaggggttcgagccttgtgcgtggggttacttagacgttcattttgatacaaggatctgggtgggtgcacggaggggctaggtgggtgcattgcatcctgacaggagcgccgggtgagttctggttgactaccagcagcgtgttcggtatgctagaggatagttacgcgacagcgtccgttccaatttctgggagtgtgttaattccgatggtgctgtgatctccgttcggctacgccgagaagcgtccaaatgtttcgacggttttggggatcaatatgtctgctatcgaggtaatcaatctttctttttcattttccgctcagccactcttggataacgtttcattcagcgttggcgatagcgagcgcgcagtacttgtggggcctaatggctctggcaaaaccactctcctgcgcctgatacgaggagagctaaccccggatcgaggacatatcgccatcagtgatgcaggagatgcaggttcttgtcgcttcccttatgttcgtgacgccactggcacagttcaggactatctggacgacgtgttggctggcccatgggagttgctcactcgcttcgaccacgtgacgaagcaactatcggctgcccaaagttcagcgagtctcgctaaagagtacgatcacatactcaccagtcttactctggccgacgtatggtcgctcgaagctcgaatcgatgaagtgttagccggtttaggtctaggccagctgaccggacgcggtcgacagcgcgcactcggctcactctcccctggccaggcagtgcggctcgaactggcaggcatcattatggtcagaccagtaactctggtcttggatgaacccaccaatcatcttgatgacgaagccgtaggctttctgatccagcaaataacagattggccggggccagtgctcatggccagtcataatcgtgcgtttattgaagagacagccacggtcatctatgacctcgatattgccccgtggcaggctttggccacagctgaaggagaggctgtgtctggcgtgtaccggtgcactggcgcctatagtgattatcttggcgccaaacaacacgcccgcatggagcatcaaaagcttcacgccacccagcaatctgaaaaacgcgcgattcgaagtcatcgccgtcgtagcgaagatatcgctcgtggtggagtgaaattagcgaaggcgcagggcatggcacgtaagttcttctctgaccgggcagaaaagaccgcgctgcgacgcacgcgtaacgacgatcaacgcttacacgatcttgctgaacatgaggtgcgaaaaccccgcaactaccaacttaagctcaaccttccaccagtcggctcgcgtggcgggttagccgtcacggcacgaagcgccttcattccaggcaggcttctcccaatcacgttcgaccttgccacgggggaacatttaatactgactggcccgaatggagcggggaaaaccacgctcttgaattggcttgctagtgggaaaacaacaatcgaccctagatccgaagccagcggcactatctctgtcagcgggcggcttgcttacgtcccacagcgcctaccacgcacaggagattcctactttcacccagaacattggaaagacgggatcagagaacttggcacgggaatactccacccatccatgtgggccaccccagtcggccaactttcagatggaaaccagcgtcgagcccagatcgcgttagccgtggcgcagaaacccgagattcttgtcattgacgaaccaaccaactacctcgacctcgccacgcttgaagaactagaggacgcgctacgccaatggaacggcacactcatcatcgccagtcacgaccgctggcttatcaaccactggcagggaacacaaatcgaattatgccccacagatccagcgcccggatcaccgaatcccctcttactcgttaagagccggttcgagccgtggtagtgccgtccttgagtgtgagtttgatagcgccgtcgtggttgacggtggtgtgatcgacgagggtgttccaggcttggtcggagtattcgagtggtggttgggtggcaaggtagtcgcgtacttcgattgcttgtgctcggcggtggcgcagatcgtcgatctggtcgctgatccgttgatgctcggcctcaagttggtggtgccgatcttcaagctcgtggtaacggcggtcgtagtcgtcagggtcgtgggcggtcgtggctgcggggtgatgagttggttcatcagcgtgatggtttcttcgatccgctcccccagcgtggcctgcttggtttcgagctcgcgggtgtcgtagacggtttcgtcgagcaggcgcatggtgtcatcgagcacgtcgttgccggtgacccgcttagccagggctgcgacgaaggcgtctttgatctggtcttcggtgacgtggggtgtcgcgcagtgatgatccttgttgtatttgttgttgcagcgccagatgtagcggcggtatttgctggtggagtgccagactttccgcccaaacctcccgccgcaatcggagcaggtgatcgtgttggcgaaggggtgggtgttggaggtgcctttgcctgcgcggcgggcgagttctgcttggacggtgtcccaggtgacgggatcaatgatgggttcgtggttgctggtgacgtagtactggggtacttcgccttcgttgattttcatggtttggttaggaagtcggtggtgaagctcttttgcagcagcgcgtcgcctttgtatttctcgttggcaaggatcgaccgcacagtggagggcgaccagatttgtttgccacgcggggtggggatgccatcggatgtgaattctttggcgatggtttgtggggttgcgccttcgaggaagcgggcataaatacgacggacggttggtgcttgggtttcgtcgatggcgaggttgccgtcttcgcctttcttgtagccgagcagggacgcgtaggacaccatgattttcccgtcggcgaagcgtttacggtggtcccaggtgacattctcggaaatggagcgggattcttcttgggtgaggctggacatgatggtgatgagtagttcgcctttggaatcgagtgtccagatgttttctttttcgaagtagacctctacgcctttgtctttgagctggcggacgtggatgagggtgtcgacggtgttgcgggcgaaccgggacacgctcttggtgaggatcaaatcgatttttccggcgagggtgtcggcgatcatggttttgaagccttcacggtgtttggtgctggtgccagtgatgccttcgtcggcgtacatgcctgcgaattcccactctgtgcgggattggatgtggctcgtgtagtagtcgatttgtgcctcgtaggaggaggcttgttcttccatctcggtggatacccgcgcgtaggccgctaccctgcgccgacgccgagtaccctgcaccgtggtgtgtccgggtatttttgtggctgggatcgcggtgacacgcttgttccgaatctgcttggtggtcatatcgcactttcctcgtccaggctcaccgccactggcacttcgccgctaatggtgtggatggtgagcgtacgatcgggattgacaacgattttcacgaggcgcgtcagcgcatactcgtcgtcccagtcgtcgaggccaagcacgcgggtgcagatctgggtgagatgggtttctcggatttgtggtgcctggcagggattgcctttacctttggtggcggtttcgcaccaccaaaacttgtaggacgtgtggcggcgtgtcttggtgcggcggtgataaaacctgctacagacagagcattcaatccgagaggtgagcccggtcgttctagctgacggcgtggctccacgtccgagatgtctgcgccgggcgagctcggcctggacggcgccgaacgtggtctggtcgatgatgggcgggtgggattcgtcgacgaggtagcgtggcagctcgccggtgttggtatggcagttcaattctgcaacgtttggccggtaatacttttgcaggattacgcggccggtgtagatttcattttcgagccatttgcggatcgtcttaccgcgaaacttggctccccgcctaggcttgaccccttcagcattcaactgactgatgatcttggcttcagtctcgatgatagccaagtcactacccacgtattggtagccgtagggttggcgcgaatgcatgagcccgtcggcgtatttcttccttatcccccatttaacattcttcgacatggatcgagattcctcctgcgcaaacgatgccagcagggtcagcaggagttcaccgtcagcggtcgcggtatcgatctgttcacgctcgaaacgcactgagacgccgaggattttgagttcgcggacggcatcgagcaggtcgacggtgttgcgagtcagcctggatatcgacttcgtcaaaatcatgtcgatgtcgccggagcgggcggcggccatcatggtctggaacccctctcgacggacggtactggtgccggtgatgccttcgtcgatgaacacgcctgcatagtcccaaccaggggtggattgaatcagatgagagtagtacgacacctgggcggcaatcgaagatagctggcgttcgtgctcggtcgatacccgcgcataccctgctactcgtagccgacgtggcgtggcgggtctaggtgggataactcgaaaactacgcgaggtcactccctgcttctctttcttctatggcgacaggtgttttggttgtatccatctacgctctaaacctgagtcttatccagtcgaacctgcagcaacaatgcccccactggcgcggttgcttcatgcccgatccgcgtaaggatcacgtggctttcgtttggggtgagtgcgccggtttcggtgagccgatcaataaaggcgacctggcgggcaagatcgacttcggcattgaacatggcacccgtcacggtctgccacctcgggtgctgaagcggtgcctgatatagcaggcatgcgagcaatacttacggtgcttgtttccgtaggcctcgaagctctcaccgcaagcaacgcaggtgaaggtgtatattgcccgccggttgagccgttcggggtgggcgtgctaccacgacaaacgacacacatccgaacagaacctttgccccgccaccgcagcttcaaaatgcccattacagtgttcgcatgccttagcaggctcaacatcaaccgccggatcgatgttgatgtcagctctgcgacagatcgacttcaccgtattgcgcgacatgcccaatctggtggcgatctgcccatacgatgcgcctcggcatcgcagctccacaactcgctcacgggtaatctcacgtgccatgacgcgctcctgctcaatagaaataaggtctctactgacagggcttcgacccaccccgatttataaccaccactgtcctggtgcgatgggaacaaaaatggccccgccaccacctcatgtagtgaggcagcgacggggcgaaacaggacagttttcatgagtcttggtttagtggcggagtttttcgttgacccggcgctggacggcgtcgtagttggatccgagtctgcgtcggcgttcgttgccgttgccgtattcgccgcggatgaccgcgtcagcgagcgcgtcaatgttcggtgccggcttcggtgtgggtgcgggtttcggtgccggcgcgggtgcgggcgtgttgccggtcatgtggtcgtaccagtactgggcgcgagccatataggcggcgtgctgagtaccggccagcgatgctgggcattcggtggctgagaagtttttgtgcccgaacacgttcttaccccaggtagggcggccgagcttgtaataccgacagatcgcggccaccaaatgtgcgccgttgtcgaggcaggcgtcagagattttccatgggttagaagaggcgtcggcgtgctcgataccaatgctggtggtattggctgcccagtttccggcgtgccaggcggtgtcgcggtcccacacgagctgcccgatccgcccggaggtttctacctggtagtgggcggaggcgggccgggtctgccacac

SEQ ID NO: 30 - DNA, 20725 bp, Propionibacterium acnes
gtgttccagtgcctcgcgggcgtgatgttcttcttcggcaccttcttgccacatgcttcgcgcttcagcctcgccatccaagcgaacctggactgtgaacgagtcctcatcgggtccgtcctcattccacgcggcaatgatcccacgggcctcgtctgcgacctgactcaacttcatcgcctgcccgacagccccgagagccggaatctcgaacacccagatattcgcctcagccgagacctcacgatgggcgatcacttcgtaggtcgtctcaccttctactgtcgtgtccattacttccactccttcggaattttcacgcctgctcgctccagctgtgccaggacaccaactgacgtcagctggtgtcctgctggtatcgatacgcgcccggctccgccggggcgtccccagatttcatggcttcccttggcgttccgcagacgggcccatccttgagaacggagcagcttgaggacgtccttagttttctgcggtttcacacatcatagtatagccccacttaacttgtaaactaagcccctgtttacattttagttggtgcatgtgatccctgctcttatgacgtcgcccgacctggcgccttagacatgcactgttcatcctcaaccacactcaccgtcacgggtccgaaggcgaggtctatcaccattcgcatcgatgaagttgaagcaggatcgtccgcatcacgcactgccgatccggacagacgccaccggccgtaccgactgtttacgatctgccaccgcagactgctgccataaccgctatcacctctgatagtacgtttagtactatcagaggtgattcaagattctcctgtcgagcagccctacagtcacgaagtcctgcgatcgtcatcgcttaaggcagacggatggccatcggggaccactcgcaaagcaggggcgatcagcaacagtgatgtgccatgagcaagtactggtgcaccggctgtttactccgcccctagataaaccacgggtgcaggggtggacaccacaccatgaccgatgtggtgcccaccccatggctcacaggcaggccctatcgccgggagcactgctgcagatgaggctcagtaacctgccatgtctcacctggggccaaggtgccaagctccccacggaatctcaggcatcggaaaccagcagccgaacttccacagcatgagcgccctacgaaaaagcaggccgccgacggttctcaagaactcgccggcggcctgcatcgccactcgaactgtaaccgtggtccgaccccgtgcacaggtaagctccacactcccaccaggcatggccgaggcagtaccaagttgccgtggcccatcggcagatttggttaaattttgaaaagtcatatagactccttctgtaaatttttaaatctcataggactctcgccatcgccagccagcttcgacaggagtcccgatgtttcaccgagtgaaatatcggcaccgtttgagttgacctaaagctcaaaagatgctagaatccatcttacctcgttaggggcgttttgtcaaacgcccctatattgcgtgtcttcgcgcgtcgtagcgctgatgctgcgcctgtgtcgactatccgtttgtaagtactttcgatgacaccagcagtggctactcatgactggtgcgtgcgggtctaaagcagcagggaaaggaatcgcagtagaagccgcttgattcctatcacccctgatggtactatcagtactaacagagcagggcttactcgatgcgtgagaatcggggacatgctgagcctctcgtaggtcattggcctgctgggcgtcagtgtggcgcggttcgatccagtgaactctatcagctctgttagtactgtcagagttgatatattcgaccccaggaggagcccatgagttacatcgttcgcaccggaaatttggtcgacacccccgagctgcgtgagggagagcatggcccgtacacctacgctcgcgtcatcgtgtccgatcgcattcgccaggaggacggcagctacgtcaacgggccagcgatcgcctacgacgtcttggcgggtggcagccaagccgtgaatctggttgaagccgccaaggcgagcggcaacatccgcatcatgttcgcgggccgttaccgcgtcaccgagtggcggggtgagcagggcactcgtatccagcatgaggtccgagccgacgaagtgagcgtgagcctgctcggtcagagggtgaccgtggagcggcctcgaggtgacgtggcatccaaggagagcacgtcgttctgattgagtccgggggcacggtggtcgccgtggtaaaccgtgcccctgacagtactattgacactattggaggtatcagtgtgactgctcaaattttcgccttgtgcaaccagaagggtggcgtcggaaagtcgacatcgacgtttcatctggcccgtgccgcggtgttgcgtggccagcgtgtgcttgtcgtcgacaacgacccccagggcaacctgacgtctgtcgcggccgccgagcccgtgggggaggatcaggcggggctggccgatgtgctcagcgcgcgtgctccagagaccctccgcgatgtgatcgtgccgggaatctggtctggcctcgatgtcgtgccgacgtctggcatcacgctcggctgggtgcgtgacgaactcgtgatcgccggtgccggccgagaaggccggctgcgggaggccctggccggcgtcgaggacgactacgacgtgatcctgatcgactgtgctccatcgctcgatcagctcacgatcaacggcctggtggccgcccagggtgtcatcgtcgtgacgcactcgaagttgtggagcgccaacggcctcgcccagctgctcgacaccatcgacagcgtgcgcagctactacaacggcgcgctgcgcgtggcgggcatcatcgtcaaccagcacgaggagaacaccatcagcgggaaaacctggctcgacgagctgcatcaggctgccgagtcccggaagctgaccgtgcttgacccgccgatccccaagcgtgtcgtcatcgccgataccgtcgaggccgcgcgcggtctcgacgagtggggaagtgccgaggcggccgcgctcggccagttgtacgcccaccacctgacctgcatcgaaggagccctgtgatgacccgtccagccccccgaaagtcctcattgagcggatcaactccggtcgccccgccggctcagacggcgccggcaccgtctgccgcacctaccccccacaaggccgatgagtcacagacgagcagcaccacgaggaagtggcggcacaaggtgtcgttctaccaggacccggccgacaccgaccgggtgcgcggggcgatcctttacacgatgacgaccgagggcaaccggaacctgagccagttcgtcaacgatgccgtcatggccaaggtggtcgagctggaagtcaagtacaacgatggccagccattccccgctgtgggagcccgaggactaccccagggcggtgcagccgccgccggtgagtagaggaccatcgaccgtcgggggcttcaccatgcccccgaccctcggtcatcctgatcctcttgtcgatggtggtgacagtgggggattcacgcctcgttcagatcagaggaagtctcaccgcgtgattagtactatcaaatctgacagtactaacagagcagatagggttccctaggtcgagctgtatcacgccgacaaccagtgagccagtgatctacgaggggcgcaatatgcacccgatcggtagccgcgaaggcctcgccctgccccgatagtactatcaccactatcaatggtgctagtggtgagtttcttccattgatgacaacagcacagtgctgccgtctgtgtgcgggccaccagcccgcacacagttgccgtcgaggacgttgttcatgctctgtggtggccggtcctgagggcggctcgcaggatctcccggcgctcacggcgacgagcctggtagccaaggtctgcatgttcggcggcgagacgggctttgagggttgcggcttctgcacggcggtggagttggtcgtcgatgagttgggcgcgggccagacgccgcttatgggggttgtcgtgggtgaggggggcgtcgaggctgccgtcgtgggttagggccagggctgctcgttcggcgtcgtcgaggccgatgtggtggacggtcacgggtgcggtggtgacgtcgaggatgtccaggtggatgttgtggccgccgccgggggcttcggggaagtctggtgggctggcctggccggtgtcggggtcataccaggacaggccgatgatctcggcccagggtgggggcgggcagacggctcgcagaagggtgtgggccaggaacgtgttgcgggccatgatgcctccaagggtgaaaagcagtcgagtagcgatgacggcggggtagccgtctgctgggctgaggccgaccgggcccatgtcctcgatgctcttgtgctgcggccataccccaaagctaccaaacagtctttttaatctcaaagatacaaacagtgcttgacatattatctgcagcgaaagatactttcatcatggtggctgatcatgattacgcgactcctgacgatgagtggatgacacctcctcaggtggcccgtgtgattccgaacaccactgctcaggctgtccggcgctgggctgaggagggtcagcttcctggggcgtttcgtactccttctgggcgttggcatattccgtggtcggctgtggtgggcatcatggggtttgatccgcgtgagtccgcatcaccgagtgatcgtcaccagagctgacagagtcgtcgatgagctttcgagtgcagagctgatggcacgacggtctggatacttgtggagatgagagacgaccacatccagtcatggtcggggtacaccgaggggcagattcagcagtgctggcacgatgaggttgcccctgccattgactcgctcatggagcaggtaaggtctgttgccgagactcctgtgccgccgggttcgagattttacggcgatgagcagtgggccaagccttttcatccgtctactgcgatctgcggttcaatgggtccgccagcgatcacttgcacgcgctgaagctcctcgtctgggaagcgaacgtccaccatgtctatgcgccgtacacccttgctcgtgcatctattgaggcatcgtctactgctgtgtggctgttgagcacgaagacgcgcggagaacgtgtgctgcgagccttgcgatggtacgcgcaggattgtcacgactcgtgcaggttcatggatgatgagcagtatcgtgaccacctattgcggcgcattgaggggactgtcgctgcgggaaatctcgactcgcgcgctgctaggaaacggtaccgtgcaaccgatgttgtcgatgaggctgatcagctggttcccggaactctgagggcgtggcgagctttttctggtatggcccattcccgtatgtgggcatccagggggctgctcgacatggaagtgctgtccagtggccaaggaatggttacggcgaaggtgacgagcggatcggcccaaatcctttgggccgtcgtggcagctctgaatgttgctctcagtgccgctcgcttgtggcgtgattcgatgtgctcaccgtttgctgttgcccagtcggtagacgcgatgccagaggcgtttcgccgccctgtttagggtctgatcggggtagtgggtgttcacggggtcccaggttggccatggggcggcttggtgatgtgagttgggttgtgtggcagcctgggtgttgggtgtggcttcgttggccacgaaggcatgctcttccttgtgctgggacttgagtccccagtgctctcccctttgctagtggggggtggggtccccggaggtaggtcctccggggactttttctatgtctgtccgtgccccaggatttcgtatctaggcagtaccaattttgggttagttggaggtttctttggtaatggacagggtgagggtgatgaagaggtggccgtccttggtggcagaaattttctcgaacttcagctgaatgttgttatcagccactatctgttgggcggtgaggtgctcggagagcttctggaatccttcgcggatccacaggttgtaggggttggtgaccgagaccgaagggtatgggtcgaccttcagcgtcaggactggctggtctgggttgagggagttgatcttcaccagtttggggtaccggtcgcactcatgtgtctcttgtgttgggggccagcagtcgggggcccattcctcccagtggtcacgcatctcacgaagtactttcctgcatctcagcctctgcaggagctcgcgcgccaccgatgggagggctgccatgatgagggcaaggactgcgaacccgatgatgtaattgaccgtgtccctcgtcacgccgttcttgccgaggattccgatggcgaacgcgatgacgacaccgcccaggcacaggtgcatggggtcatgctgtgatggtttttcttcttcagcgactggtggggctatagtcatgtgtgccccttagtactaagtgatactggtgggttgcttttccccggtggccgtgtgcaagacggccaccggggttttccttcatgttcctgattttatctgcccggtgtggcgttttcatctttgtgtgggtggttcgcctggggtcttggagtgtggtgacgcggtgatggtcacggtgacggtgactgtggcgcgtggcgggtgaggtggttctttcctggtctggtgtgtggcccaggtgagtgtggtgatgagggccagggtgaggatgatgaccagggtggggagtagtttgtctggccggtgtcgccgggcttggtggcgcggcatgtttttccagggtgtgtctccgaacaggtcgtcgtcggaggggtcgtcgtggttcatagggtggccttggcgatggtggtgggcgagtttggtccaggtgatggtgccgtcggaggcgatgtggcggtcggcgggcagggtgtggacggtccatccggcgtcggtgagggcggtggtgaaggatttcttgatggatcgtttgggtaggtcgatgggggcgtgggtgccgacccagatgcaccggtttttgaggtgggtggcgccgaggtggttcatgtcgcggaccatgttttgggtgagtgtgagggtgtcggggtcccattggacggggatgatgatgtggtctgcgatggtgatggcgtgttgccaggcggcgtcgaggtcgttgtttccggtgtcgaggatgatgacgtggaagcggcttcttagggcggtgatgatgcggtcgaggtcgtcggcggtggggggtgtgatgaggctgttgtggttgtcggtgatggtgggtaggcatgtgatggtggcccagccttctggttgccaggagatgtaggggccgaggtcgcggggttgggaggcgaatcctgggtgacgggctgcgcgggcgaggtcgatgacggtgttgtcggtgtggcggggtgcgcgggtggagagggtgccgcgtgggttgatttccacgacgacgatgtcgtcgtgtcctgctgtggtggcgagggcttgggcaaggatgacggccagcggggttttgccggtgccgcctttgaggttggcgagggtgatgatgtggtcggtgagttgggcgggtgcggcggtgtggtgagggttggcggtgaggttggcgatggtgaacagggcatcgagatcgtcggtggtgttctgctcggtgggttgggggtcgccggagatgatcgggtcggcgcggcgcggctgccatgccggcctcaccactgtcacgaccaccacgggtctgctggcgctgtgtgggtgtcgtcggcgatgactcacgatcggcagtctcaccatcgtctcggtgatgctcggctagcgctggacccggtcaagttcgggccggctcacccagtggtgatgactcggtcacagaaccgctgccggtcgttatctcggacgtctcgactcctccagtcctgatgggcgttggagccacctacacctactctcagaacgaccccgacctcgtgtggggcgggggcagatgtcacttgggccaatcgagagcccaggtgatggggaaagcaggggtgtgatatctgtcctggaaaactgggcagctgctaccgtggattgacggatctccacgaaagaagggaatgcgaccatgcagatcaccgtcaagaccatcaaagatcatcgggttcgcactgtccagaccgccatgagcagcgccttggggattggttcccaggtagacatgctcgcccccggcggttccaccagctcgagttccggttcatgctgctcgtgctcgacctgcgcggtagtggcgcagcctcaagactgaacggctggtcagccccaggggcgtggcgctcatcgcgtcacgccccttctattcgctggacagggtgcgcgagctgaggaacatcgcggtgtgtgcgatgacgaggggcaggagcaagtctgtgcgggttgccaagtagccctgcgcgatggccatcacgctggccccgacggcggcgaagacacctccgatacgtcgcttcatgccgccgaattgcatcaggacgaataggactcccgcggtccacatccctccgggcatgcatctgggaaagatgaaccggaagatgatctcttcacaggagagctggagtactagcagcgtagcccccacggggagactcacctctactgacagacggatcgtcttcatccacccacccgagctggcatcgaccatttcggtggccatgcgcgaccggtggcctcgtgcctctcgctgcgtgtcgatccagccgagcagtccgtggacgctctccgctaggactcctgacgcgacagtctcaccaattcctaagcccacggcgaggaccgcgacgcccccctgcacggcaggctgtgtgacttggtggtcccaccaacccgccggcaggaccatgcgtgcgaggctgcacacgagcaggaggtggagggtcacgacgagcgacatctggaataccgcttgccgttcggcgatggtggcgttgggaaagagcggtaggccggcacgggcagcggcgctcgacagcttccgcaagagcggtttggagacgaagtagtaggcgacgtacagcgccagcgctgtcgcgatgatgatcatcggtctgccaccgagctgacccgccgatagccgtttctgttccaccaatactggctgttgtagatcaggtggcccagaacacaggcccagatcccccagaagatgaacaggatagtccccaaggcggcgagcgggatcttggagaggacctgtccccgtccgaacaccgagtggccgcaagcaaacaagagtgctcccacagcggtgagcgcgagccaggccggggttgctcgcagactgatcaccgggaccccgacccggaagccgacctcttctcctacagcgatgactagcaactgccacagcggcatgttctgaacggagcgcgcgactcgggctcgagtcacccacacgggctgttgagcgctcacatcaccactcaggtaccccggtgaggcacttcgcttagtactggggcccgatgtgcgagcattcgtgatgtgtcgcaggatccggttgtcaagccaagaggccagcagggctccggcgacagtgacgggtagcccgatcagcacgaggccccagccatgcggtgccgagaggtttctggccggcgtgcacgcgaggcaggcaaatgccatcactgccagcactacgacgtagatggtcgcataattcgacttgcgggtgacgttgccgaccatcttggccaaagtcgctggggaccagctgatgagtgcgatggtggtcagcaggaagcaggaccagacagacatccggcgcactcaggggtatgggtgcggctgtgggttttggaaaccgccatatgcggcgtagcgggggtgtgcccgcatgggtgcgctgggcagtgacagggcgagcagcccaggcgcccagagcctgacacagtgcagtcccagcccctggatctctatggtggtgaaatcttcgatgtacaggggtgacacacaggtgatgctgttgaccacgctctttaccagttccgcccccgtgtgggtgtcgtcaggtggcaggtcttcggcttgggcaatggtgcccgcgtcgaatttcgccacaactgattgcgcggcctgatagttcctcgcgtagtaggagacgttcgagtcgaggtcaagcatgtcctccgtggacatactggacgcgtcggcctcggcgtcgaaagacgtccataccgcgagcatccgaaccccgctgcactcgagaaacgccttgtacatggctgcttccagacccgcgtctgcacctaggccgacggcgacgaggggaagttggttgccactaccgaccatcatgcatgccacggtgaaatgcttgagcccgggagtcggaagccagtagaaacgcagttcgtggcttcggcccgctgcacgttccacgagccgctggatgcgctggaggcggggtccttcgacgcggatgcgcacaggtgacgaggctccataccacaggcccatcgcggcatctacctggatcaattcataagccgcggacagcgttgcggcgacgcgtgaagtgtggacggcggtgccggtcgtcacggccgttcccagccacggctcaccgtcgtgccgacgggggttgtaacccaggtaaaagaactgcgccgggatccactcctgccgggaggtcccgacacggggagtcttgacccatgtcatgggcaagtcgtcgcgataggtgtcgaacgcacctccagccactcgttgcgcgaagccgaatgcgcccagatcgagaacttcgtcctcggtccgggcgaggagttcctgacgagtcgcccagcgccgttcgaagggactatggagaatcccggtacccgcgcagtagcgctcgacggcctccgcgtagaccttgatctctgcctcaaactcgttcagccccaccccaccgatgtggtagctacccggcttggggtcgggccggtcaagcagtgcgtgcatccccgtgagttccccaccgttcacccgcacgcgggggccgagcgcggggtgcagcgagtagccgacggaagtcaccagcccgcatagcgggctgtaggtgcgccgcctgagccgggctgcggtctcgacggggtcgctatcctggcgaagcttcatcgctcgccccctgccgccagccactcacggatgtcgtagtacaggtccggagcggtttcaacctgcgctggtgcatcaaaacgggacataggtaggacgtcgttgtaggcgatctccatcgtcggtatgtagaccgacaacactttgttgcgcgtcgtgttgaggccgttgcgggcgatgctgacagcctcatgcgcgacgtgcgcggccaagatcgcgcgcaccgacgctgccacggccggcgctccggcccttacgcggtcggcagcggccacccgcatccaggacaggtagctctgccgttcgcgcaggttcatcgcgacccgctgctcgaaggtccggtaggacgaggtcgcaccagggacgacgtagggacccacgtacaaggccggcccgtctacagctgcgtggagccacgacaggtgggcgcgtcgggcgaacaggtcaagggcgcgcagcatagccgggttgttctgcgccagcgctaccacaaggagtggctgcaggtccggcgccgaacccagcaacgccaacatctgggaggcctcctgctccatgtgcaactcgtcggccgactgctcaagccgcaggcctgcgaagagggtggctgatggctgcgtgtcgtcagcgaggacggtagcctgcagcccctctccctcgagaatctgctggatatcgccggcgaggagcgcgtcgtcgctgaatacccacaccgggcgcgtctctctacctccatccatcttgtcctcaacgttttcgaccagcgcaccgatcgatgctaggtgggccatcacgtcgtcaagggccgcgcgggtcaatccgggcacccgggacacgatctcgggcggctgcagtccttggctcaacaagtccaaggccggccacagggtcccggtggcgtcgtcgtcctccagcgttgtgctctcggcgttccagacgcctcgacggaactccaccctgtccatcgagtaaggcaccatcatgaggcccggtgaaatgtggttggtcactttggctcctgtacagcctaggcttggacgcccacggtcatggtgtgggtcgcggtttggaaaatcccgtcgaggttgagtgcctgattgagttcgtcctcgtagaagcttgaggactcgactgaggcaagaccgagccccgtgcagaccaagttgatctgttgtgcgatcgccccgacttcttgaagggcgaacctcaaacccctggctccgtacttccgcatcgccctccacggcgagatgacgaacaccaagtgcactccggccgcatccgattgctccacggccggctcgccggccatcgaattcctcacgccgcgacagccctcttcaccggtcacgggcaccagtcgatcgatgaccggcgagtagcggtagacgccgcgactcaagccggacacccgttgtgcggacatgaagatagacacgggatacagccctccaccagacgggacagcgcgtacattataccgcacgatatcaccgctcgaacgtgggacatccacgtgccccgtcacaccggcagcacctctcagaaacgcagctacgtcacgcaggtctagggattcgccggtgtagttccgtccgctgcgccggcgggcgatcacttgctcgaggggtgcgcgcaccctgctggacctgggaagttcgatcacatcggcagcgaacgtgtcgcgatccatctgtccgtacgtaacgatcatggggtcaacgaaatagtcgccgaccgagacgttgaactccatatccccccgggcgatgcgcgaggcgagcaagaagtctgcagctgcgttagacagccccggcccatcagtgttgtcgcagcggaactcgtgggtccgaaaccccacaccttccgtgcccgggctctgcgctcgatacgacgtgatcgcagaactagccttccttaaaccgcccggagtagctaccatgaccgtcccctctgaggtctcccgaacacttgcgacaatagcagcatgtgggggcagccgccagaggcgggcatccttgtctcgacaaccattgacctccggattcgatatgtgcataatcatagtcgtgccaacacgaaacgtgtacgtctcggaagacgacctagacctgttcgccgaagccaccgagatcgctggaggcctgtccgcagcggtgttggaggccttgcgcagctacgtagacaggcaccatcgcgcggccggcggattcgacgagatcgagctggagctgcagaacgacggtatcgaccaccgtgtcaccttcatgggtcgccgcctgatacacatccgccgtccagatcccgagggaacccgcatagacactgtctacttgaccgccaaacaccaattcgccgttgccaccaaaatccaacgacggctgccagactggacggccggccacgagcacatctggtccgacccggagacctggaatcgggagttctggatcgcaggtgacaagacgatggccgtgtatcccagccttgacaaactccgcgaagctgaccccaatgtggccgaacgcgccgaggccgcggtcaaaatcccgccgttcgaggtcctggacatctgatgacagaatcatcatcttcccggcggcaattggcaatgccggtgctgtcagtcacggatctagccaagaaatacgtggttcatggcggctacgaggtcccggcactcaacggtgtctcgtttgacctgcacccgggagagatgctgggtttgttcgggccaaacggtgctggaaagacgacgctggtcaggatcatcgcgggcctcttatcggcagattctggagacgtccactggggatcggatcaaggtcgggccaggttaggctacgtgtcccaaaagggtggactgcagtacgggctcacgtgccgggaagagatggtcttccacgcacaatgcttcggccagtccgccaagcaggcccggactagcgtcgacgaggtcgccgcgatgctgcactgcgattacctgatggagtgggacgtcggaaggctctccggtgggcaacgccgaatcatcgaggtagggctagcactcgtcaatcaaccatcggtcgtcctgctcgacgagcccaccctgggcctggaccccgcaacacgcctgtcgttgtggcaaacggtaaagtcggcacgccgtgagaccggtgctgccttcctcgtcaccacccactacattgacgaggtggccgagcacctgtccaacgtcagcgtgatcaaccacggaaccgtcgtcgccaacggctcgccagcgcacatccgagaaatgttcgcgaccggggaagtaacgctcggcgtggccgaggatacggtggacagtgcggtggacgtgttggctgggaccgcgttcgaggcgcaccccaccgaaaccgtcccggggatcgtggtcaggtccaggcatcccgacgtggacgcggccaagatcatcaccatcctggctggtcatggcatctcggtggactccatatccgtacgcgaggcgaccttggaagaggcgtttctcacgatcacaggcagtcgagacccggagaggcaaatcccatgaacacttgcttcaggcgatatgcggcgatgtcgctgagagcgcggcgtgatttggccctgacattcatccagcccctcgtctacctagccctcttcggaccgctcttcgtcacgacgatgaagatgtcgcagagagctaccgccgctacgggttactccctatacatcacgggcctgtccatccaaatggccatgacgatcggtgccttcgcggggctaaccatcatcctcgaataccgactcggcatcctcgaacggatctggagcacccccctcacggggagcaagatgatggcggggcgaatcgcgcgcgacgtcgttatgatgatgatgccgatactggtcgtcttcatcatcggcctggtgctgggaacacgccccagcccactgggcctggcgacctacttcgtgacagtgctcggcacaggagccacgttcgccggggtctcctacgcggtggcactcagaacgaagagcgaggcagcgctatccgcgatcttcaacctcatcctgctacccatcctcctgctgtcggggatcatgctgcccatgtcgttcgcaccacactggatcgccaccgctgcccacgtgaacccgttgtggtacctggtgcaaggcgcgcggaaccagttcagcgttctagggctcgtggcggcggccccatggagttgggctgtggccatcgtcatgtcagccgctgccttcggctgggcaagccacgaattcaacaagaggcgctgacacaaagaatggtgccgggaacccaggtccccggcaccaccgagtgcactcgcgacgtcaacgcaccgttgcggtcactgcgcaggtcgagcacgaggacgacgagcccgcgctgctgcaggtcgagccgccaggcgcgagcaggtcgacgttagcgtcggcgccgccgaagacggacgtgacggccggctgagaggtgcggatgcggtgctccagcgaggaggtggtggtgagtttcatgggaggtgctcctaggagtgagacgagaacaaaccctagcgataggttagcagtccgcaaccgactccgggaatagtagaagcgcgcatccgtagcggaagaccttagcctgattacagtgaccctgttcgcgtctcaacattattccacacccccgagcagcgaacgacaccgcgatgatgatccgtcgcctctccaccgaagaactccgcgcccacatcgcaccgggccgccgtcccgtgcatcagacctgccgtcaacgtcggccatgaagctgggaaggtggctctcgtctaggagcagacgcgggacgcctcctccaggttgggccggggaagtgtccggttcttgatgtaggtggcggtccctattgatgggcgttgaccgtgggaatgcggtcggcgaagggggtggcgaacccgttgagcgcaggcttccagcgcatgcatcaacgctgtctgccggccaccggcaagcctcacccgcccgtcatggccatcatcgaggtgccggtgaatcctcgacacatgatcccaactcccccggaggggcttccggggctgttcagccaccagatcagccaggcggcgagcccgactctgccacccggaccctgcagagcgtgcctgctgccgtcgtgtcgtgtcgggccagtgggccaccagatcggccacatccgtcttggcccatctccagcccgccagacccagggaggccatcacctcatcgacgccgcgccgggtggtctcatcaaccccgtcaaacagctcgggccacctcgatgatgccgtccgtgaacgatccagattcatgacatgctcctcttcacagatgccgacgacgatcaggccgtggccgtggcaacggggtgacctgccggcgcggctcacgacgttgagccggaaccacacgagacgcaccagtgtgctgcgccgtcttgagtcgggcgctgtactgggccctggcgctgtggtgaacagcccgacgaagcaccgaccgccggctgtcctcatcgccagggcgaggcatggggcgcggcatggtgcgcccggtagcagcatccatgagggtgatccggtcagccaaaatgccgagccggttttcccacttccggggccacggcaccagcaggtcacgctgacagcccacgccgtggcgtcggcagtccacaacattttctcacggccaggatgcgagtgcagcagctccaccggaacaccagcatcacgcacccgccgcatcgtgacctcatcctcacgtgccaccagcgggggagagcgactaccgctgcagccggtccaaagcgactcttcacagatgagggggtggatcggtagctgacccctaggtcctgatgtgggtcgaggtccttggaatgatggaagttcctacacacccatcgccaaagacctcaacatggacaacgctaccttcaccactccctcatccgtgaagagccagtttatgcacggtgttgaaagaggcgtcggtctacgacgaatgcgggttaatggtcttgcggtgtggggcgctgggcgatggcatcgagaacgcgtgagtgggtggcgatccattcggccgcgtcggggttgatgttgcgggcgacggtgtcgatcgctgttacgtagtgggcaagcctgcgaatctcagcttgttggtcagggtgatcgctgatgagaggctcttgatgggaggcgcggttacggacgtggcggatgagctccacgttttcctcgaagtcgcgtcggctacgccccgggtagtgaggcatacctccgttacgtaagtcagtgagagctttccatacggttgcttccaggcgcggggtgagcagaaagcgccagttgtccagtgacagactcgccacgatctgatcaggggtcgcatcgagcctcgcgcgccgcagtcgcttctcggccctggcgacgttacgcgggaaaccaccgagccgatagctcggggattcccaccaacgccgtatgccagtatcggcgctcaggcgcacgtcaatgaagtttctcaggagtacctcgacatggctgatgtcttccaagaacgctttcgagatgcgggtgttccacacgtaccacgcatcgactggttcgatccggtagcggctgagcctggcgggtgagaaccactcctgcaacgtctcacgactcaccgtgggagcgtggtaggattgatgacgataggcctcgggaaggtcaatgccgcgaaatatcggtatacccccgaggccattgtcttgcccaggcccctcctcgcatacttgcggggcgtcattggctgccgtcatctcgtctcttcccggtacgtggctgtccatgttcacgggcaggtacggcaatgaggttcccgcacacaaacctctaccaagcatacgctggcaagcccccctctcggccccaccacaacatcaattgctgactcgaacacctttgaggcagcgctttcggcttgcgcaaccccacccacgacaccgtccgcttactactcgaagctgagggattcagaccccacctacaccctcgattgtgaagagcctccaaagcccgatacaacgtctggcgagacaccgtgaacgacctcgccaccgcagcaacgcaccagcagcgcgggatggcttggtattagcccagcgcagggcccccaggcaccagccctaacgaccccgcacccgacgtggctagaggataagccgcacgggaggactccatacccgccgactcattccagcccgccaccagccgagccatatgatcaaccgcccgcggtaaataatccagccactcacgccggtcgtacaaggaaccggccccgctccaggcgtgtgcccaggatcgccacaacacgtcgagctcgaccaccacgcccggaatagattcccactccaaatccggatcagcggccgccacgtaccagatcggccacatccgtcttggcccatctccagcccgccagacccagggaggccatcacctcatcgacgccgcgccgggtggtctcatcaaccccgtcaaacagctcgggccacctcgatgatgccgtccgtgaacgatccagattcatgacatgctcctcttcacagatgccgacgacgatcaggccgtggccgtggcaacggggtgacctgccggcgcggctcacgacgttgagccggaaccacacgagacgcaccagtgtgctgcgccgtcttgagtcgggcgctgtactgggccctggcgctgtggtgaacagcccgacgaagcaccgaccgccggctgtcctcatcgccagggcgaggcatggggcgcggcatggtgcgcccggtagcagcatccatgagggtgatccggtcagccaaaatgccgagccggttttcccacttccggggccacggcaccagcaggtcacgctgacagcccacgccgtggcgtcggcagtccacaacattttctcacggccaggatgcgagtgcagcagctccaccggaacaccagcatcacgcacccgccgcatcgtgacctcatcctcacgctgccgatcaccgtcaaccagatggtcagccacgatggtgttcacaccccatgactcatgcagttgcctggccaaggcgcccaacacctgctgacgcacctgtgacttgacgtcatcatcctccagatcctgtgtaccaaccatcacggaggccaacacatcactgcgttgctgaaccagggtgttgacgacgtcgacatcgtcgatacccatgggattgttggcgcgcgcggccacggcatgaaacgtgttggactgcaaattctcgaccagaccacgccgatagtcgttgaactgggaggtgtcggcaatgacaccggtcatgatgtaggccgacccctcggacaaggccctgtaggactcgtcgacgaacgccaccaaccccggccgccgccggtaaagtcgacctgcttcctcgtcagccagcaaccatgacagtttttgccccatatgtcctccttgctgacatgacctcgaacatggtaaactttccgtaggaaaaacggggcaagtactttcgagcggctacctcggcccccggtgggctgtccagccttgtgcggaccgaagccgggggattccttatgtttgcggcaatgatgccgctgcaccccctcatgccgtggtgtggtcctttccccgtgtgcggtgtggtgcgtcgttgactggtttgtggccccgagccttactctgaccggtaggagaacggtgtggggtctacggatagcccactcggctcccggtggaatgtccaacagggtagggttgatgagttggtccatcaggaccgtcccggtggctgcgtcaatgatcgatatttcgatgatgcgcccgtccaggtcggtggtttcggtgtcgaggatgactccgactccgggttctaggagttggggatccaatgggtggtcatcgtgtggctcctacagggagtgtctgggctggacagcggtgcaatacccgcgccatagcggttttttctgcgggggtgacccacagctggtatttcgttttgacggcgatttggcgggccacgtagtcgcatctgtaggccttgttagggggtagccaggtcgctgcatccctgtctcgtttggcctcattagcgggtccgtcgacagccagcaagttcaacgggtcgttggccagggcggtgcgttgcagcggtgagagtttttgcgcgccggtaatccacgcgttcccgagggctacgacgtggtcgatttggactgttgtcgaggtgtgccggccgcgccgccaggcgagtgtggacccggtgtaggggtcgtggagtcgcccggagacgaccacgcatcgtgatccgggtttcaggtgggcctcgaccaggtcgcgggcaagggcatcgttgcgggtgtcgcatccgttgtggccccaggggcgggtcaa

SEQ ID NO: 31 - DNA, 56169 bp, Propionibacterium acnes
tgccgacgccttcggcgtcgggtgagcgcgtggataggcgccccttcggggcacctgtaagcctgtatcgctgcggtttacagccttggccacccaaaggggcagcaaggggcccggagggggcattctgcgccgctgatagcatctcacatgtgagttattctctcaactatccttcaagtcaagcgtattagattatttatctagtactcttgacagtccgtctatcgggctatatatttataagcagaacgagagatcgggaaaggaatcaacgatgaagtacaccgcacacgtcaacatggtgaccaagccctacatcggacttcccactacccgaaccccctacaccctcgtcgacgccgactgggccacaacatggatgatcgacgaaacctacgaagcccactaccacggcaccagcgtggagatcagcatctacggcgaaggccccaactgctccgtactcaccaaccgcatctacaccgaccagcccaccgatgtgaccgctgcactcgccaactacggcttcaccatcgacaccaccaacacatccaaaaccatcctcacgctcacccgcacagccaccatctcccacctactagccatcctcgatggcctaccccaagccgaggggactcactggctcaacactcaacccgacctccaccacatcaccctcgacgactccaccaccggctgggccaccaaccgcaccgacgacaccgacaccggcgtctgctacgacaccagcacccacaactggcagatctgctgacagcataacgggcctgcccttgaagggttggactctgcacccatttcagccgggtacgttgccggctgggcgaaggaagcagacggcgccgcgattgaagctgccgccgagcacgtcgcgaagacctcccacgcgattgccgaggcgttgcagctcaccgcacagtgagccccacggggcgaccggctcaccccggtcgcccctcaccccccgacaggggaaccgttcccgccgcctgaatctccatacccctgatacgtactacgcggggtcgaggagtggactcccccaccctcgtgtagtacactatactacacagtcattgaggatagaggtgacgtcatgagtttttcgatccgtttaaccgaccatgagcgccgcttagctgattcctacgcccgcctgcactcgcagtccctgagtgaggctttcaagcaagccctcttcgaccgcatcgccgacgagttcgatctgcaagtagcccgtgaggcactcaccgactacgcccgcgacaactaccagtctcgccccatcagcgagctatgggacgagtgtgacctatgagctggcagatcgaaaccacgagccggttcgataaagaattcaaaaagctagaccgctacacccaaaaactcattcacggctggatcacgaaaaacatcgacaacaccgacgatccccgccgccacggcaagcccctcaccggtgatctttccggactgtggcgctaccgcatcggcgactaccgcctcatctgcacactcaacgataaccgcctcaccatcctcgccctgtccatcggtcaccgccgcgacatctaccgataagccgttgcaagactgcggcgtcgacaccgccgggaccctggcccaggccttgggcctggaggaggacgagagcgaggagcacgccgcctgagcggtcgccggcacttcccataacagcaccggtcccggcggcccggccccgcgtctggtgctcggaccgatgccggcgcctggcctccgacgcccgccggggccagcggctgggctacctcgacgtcgacgtacaacgggccgaacgaaccgtgcgctgatttaccaccgcttccgcacagagaacatgcctctgactaggagaaatgacgttttccacagggcctctattactaatatccctattatctctatccacgcgcgcgagcctcagcgttcaagcttcaggtcttgctcgtctccctcgcgcctcgctgcgctcgttgctactgccgccccacccggcaagccgggtgggttgccatcggaataccgtggaccatcccggcgcatacacccagacggtccaagatccaatccacgctcacccgcgacgccgctaacgatcctcatacaccgtagatgccgttctgagagccttccagacccgcacgtgggtttattgcaccgagacccaaatcccctcagaagcgatcctgaaaccgtctacgccccatttccgacggacgctggacaggctgggcggcttgtctcccgccgcagacatggccctggcatatgcggttgccgactggtgggatcagggattggatcacacggcagacggctggtccaaggcgggtgtgcaggtgcggtgagcggcagacgtgaccggtggggtgcactgtcatggccgggcatctgccgagccaccatgcgggccctggaccaggaggcagcccgctgcgaggactgggggaagacggcggcacggatgggccgtcgggatgcggcggccgaattcaccgagactgcggtgcagcatcgtggacagatgcaccacctcatgtcggcacaaaaagtgtgggtgtcgaccgacatggtgtcggctacactggacgccgcaggagacgtgccgagtttcgaggccgtcgacgtccctgccgccgggctcatgggtttggccagccccctgccgccggttaccctgcagcatccgctgtatctgcgcagcgacgagggtgtgacaaccttcactgatccggttctcgtcgacgcgctgggatggtggatggattctgggcgtgtgcacgtggtgatgtgcacacgcacaccccggctgcccaacccggtttatgcggtggcctccccactgacggtggtggagaaaatcacggtgcccaccggcatcgagttcgagaccatggagtccaggatcctgacccccggcggcgtgacaggcgtctcacggcagggcacacgcatgatgatccggttggcgtcatggctgggtgccgcgtgggtgctcatggcgactccgacggtgtcggagccgcaccctatggatggccggtggggaggcccagcaacggggcagacccggccgcgtgatcgggtgaccgtggtcgacatgcggcccatgaggcaggtgcacaccaccaccgaccccaccggcaggcggttgacgacccggcatgtcgtgcgaggacactggacacaccaaccctacggcccggcccgcagtctccgacgcctgcagtgggtcgccccattcatccgcggccccgaaggggctccgttcgtcggcaccgacaccgtcaccgtatggcgccgctagatacgcgggcgcggggggttgacgaacgatgcccccctctttgtgttgtgatcagtcgtgatcggcgggttttaggtcggggtaggtgtcgagaatggccttgaggacgaggtcttggattgtggtgtcattctgggctgccttgaccttcagtccaacgccgatgtcccgggggattctggtctgcaacttgaacaggtctgcctccttggttttgaacagtttggctgcagggttggcaacgggctgttcttggcgctggcgtccaaggttgcttttctttcgggcggtcatgacatcatctccaacagttcgtcggcaacatcggcgaagaaggcgatagtttccggctcaggggtacagccgtaggcgcgcttgatgacttgacgcttggggatgacgtgatcgaccaactgcgtctgggagtcgttggctagaaggtcgcgaccttccttgaacagggaggtattcggttcagctttggaaagcagcaccacgcgcggggttcctgcggcggcgtcgtgcgtctcccaggtgcgcgccatgtcgagcccggacgtgtcggtggggatgataaccagatcggcggcgcgaatggcggcggtgatgatgtcaccgttgcccggcggggtgtcaatgatgacaacttcttcgggtccggcgacgaggtgctggagcgtcgccttgttggccggttccacggggaaccccaaggggtcggcgttactcagtgtgcactcggcccaggatgatgctgacccttgagggtcggcatctttgacgcggaccatacggcccgtctcatggagagctgcagccagcaggatcgctgccgtggtcttaccgacgccacccttggcgttgataatgctccagatcatggtgacacctttcagtgaggatgcatatcagtttacctgcaaggagtaaagacggcaagcagttatgccgtttctgcggcaagccgtcttgcatccttggatgtatagatagttgtctacttatggttgtggatcgtggtgtctcgtaccaggatttagtgtgctcgctgatatgcacgactttcgggcggcctgatctggcggtggtgccactaacccaggagtctgatccgcaaggtgtcctcgactttgaggaaggggtctctgctttcgtgttgacctaaagtcaacggccctgggcgatcactgaatcctaataactttgtatccttccctgattgcatcttagcatccttgaattcaaacagggatggagccatgctgttttgacgacatggatgcactggggtttggttgttgccgatgcggagcgtcaggcggcccgggacgccgccaccgccgacacgctgcgggagatcgtgggactgctgggccggggcggcgaggtcccgcccgccaagacggggcgtaagacgaccggcaggccggccccggcccgcaagtcgtcggccacgcagtaaaggcagggatccgtccctacgcagagagcggaggcagatcctgggggatccgactcttcggttccgtgatcttcccggagatcttcccggatcccccagggctcatcctgatacggggtccgccgacggaccccgtatcagtgggggcgctgccaccagtgatggcgggcgggtcggtcggcgtctaggccccgcccgatggtcgcctggtctacctcgcaggcccgtgctgttgccgaggccgagaacgtctgcccacttgttgccgattcagtcccctctccgtctgccatgtcgccaacctttcctatctggcgtgctcatggacatgcccgggcacgccctcgctgctcagaggcctgctcgttccacctctggccgcgaaccgtatttctgctgaccactcctcgtgcgtgaatatttgccagccttggccattcatatttggactactctgcaccagatatcggactgggaaacctcttgcacatctctaattgtcatctattcgttgggcgcgcgctgttagatcgtgatcataccaatcagaagacaaagcgacgcccttttgagcggcttttcgaacgattctagaccgcgctatatcagcatttctaccgcgcggccagagtgctacactaaattcctctctgcaatccttaagtccattctttacttcctcatccaatttctgcgacagcatttttatggaagcatcgcactctgactcatcatcaaatgcctcaattgcgtgcgttcgccattcacggcgcgtattatcgtagccgtaatgaagtattacccaccgatccacagaatcatcgttaggatctacaactgtcatgaatggcccaactctcgctctggtgtattctcaattgcagttcagtgactttacttgaccagtcccggatttagtagacgtagacggagagtaccccgccgggaacttgactgacatcactgctgtaccgtactgctttcccgggtggcaaccatcgtaagcagcatttgccgtgacgtacctagtgctctttctctgagtgccggtaatcgccttatatggtacaggtgggtgaatcgtagccgttacggctaccgatgacacgtttgcatcacatgaagctgtggcgacataattagttgtcccattgacatgatgagagtcgtggacatactgtcgaggatcgagagtgcaggttattgttgacgccgttgttctggtaccagctgctttcgagctctttgttgcagttacagtctgcggccctgaaggttttactgacgcgactgatgtgttcgcgtgttttgcggcagtgctttgatttggttgtgcttgtgtagcagttgctgatgtcgccagtgatgcccccattaccatagctgtgattatggcgtagtctttacgcttcattgcgcccccaaataagcatgttagtttgctattttgaataggaaacgagacatcgccatgacttgtcaagggcagaagtagaaagaatcggggggtatcaagaaagatgtgctttcatcaggacgaaagcggatgggtccgttcgacttggtgacgaatgatccggccttgcgtcgcggagaccaggccggcgagtttgtcgagcagggccgccgtggcctcatcgtcgggcacatcactaaagggacgaacaaccatgacggctagggccagaaacgaccggaactgaatcgcatgtggacccccatctggcaccaggcacacacctaccgaccggaaaccctgcaccctgtcgctcccagttcacctcctaatatgcgcctatagtctgtgctagtagacattattttgtgtgttgtttcccatctggcatgtctggccccggacccgccgcgacacgcggtggtggataacagaccaggacccccggaccatagagaccagggggacgagacagtcccccggtgaggatgtctcgatgtgcagatcaggaacagaatcgccgggcacgacccggcgccggtgccggtgcagtgaacccgtggcccatcgactccacgaacgaacgtctcgccttcctcaactggtgttggcggcaaggctactcagcagccatcgtggaaacgatggacgccgcgggagcctacgaccacctcgacgacgaccagaccagcaaccagcacgactaacgccgctcccagcacgggggaaggcggcgcaccaggtgcgccgccttcccccgtgctggtgtctcgtcggcttactggtgggggtcgtaggggaacccgtaggtgtgttccagggccttgcggagaaggtcgttcatagttgtgtgttcggcgacggccttcatcttcagcgccgtgtgggtggcggtgggtagcttgacgttgaacgcggtgatcggggtcttggccgactggaaggtttcagagacactggctccctggctggccgccatttggtcggcgtaacggctggctttgtcggcggcggtgggtttgcggttcttactcacttcagcatctccttgattcggtcggcaacctgggcgaactctcctagatctgttggccgggttccgatggcttgccgataggcgacccgtcgatgaacctccgcatcgagaacgtctaggccctcaacggcggcggccccctcgtgggcatcacggtattgcctggtccaatcggctttgttgaagagcagggcccggcgtgtgccgtgggccacctggtaggtcattagcgctcggtccatgtccaggtcccccgactcggtcgggatgatgaccacatcggcgatgtcgagggctgcggtgatcgtctgagagtcaccggggggagtgtcgatgatgacaaggtcggcgtcgatgtcacggcagcgcctgacgataggggcattagccgggcggacctcgaagcccagcgggtcaccagtctcgaaagcgtcggtagcccatgacgtcgccgatccttgcgggtcggcgtcaagcaagatgactcggtactgagctgctaaggccgttgccaggtagaccgccgtggtcgttttcccgaccccgcccttggtgttgacaatagaaatactacgcataaatacatcattacacatgtgcatcgatgtatctgtatatatgtgtatcggcgtgttgtgagggaaaacccgggccacatacaacgatcccccagccaccacagccgggggatctctcagtaaagccagcaactcccacagaagttgcacccccacgatacccaccacatccgtgtcaagcccccacaacacccaccagcgccctaggcttcccccatgaacattgacatggacacaccaaccgaaaccgaagccgacaccttcgatgccgtcctcgccgacattaaccacatcaaccgcctcaccgccgacgaaatcgagtgctactccatgggagcctgtctcctcctcctcaaccaccaccccttctccgaactccgccaacactgggccgacaaccccaccgacgaaaccacgtggaccctctacggggccatcatcgccgcctccaccctggacccccacctcagcatcgacgccctagcccgcctctaccagctccccctcgacctcgtgacccaagccctcaccgtctaagcgtcgatgagcgggggagaggtagcgcactatcggctaaggaaccccacaaacaccaaacccttgtcactgggaagggtttggtgttatgctggtctcacaactcaacagaggaggtgagacatgggaaatgagtaccagaagtcgctcaaagtcctgttcaagaaactggaatctgagcaaggagcccgcatcgagacccggcgcaaaggatggatgatctacccgccggatacgtcacgatcagcggtcatgatccacaagactccatcagatcgcagagcatgggccaacatgctttccgaactgagacgctcaggattcaccgtctaactcagtgaagggggctggagctccagccccctttcaaccacctcccccggacaccacacaagaaaaggagaacatgatgtggcacgttcggttgtcgcttcgcgcaatcagcgaggacatgctgttcgacgccctggacaccctcgaccccttatccccggtggccacactgggccccgatgagcacaccggatcattggcggtgttcgtcgaggctgactcactgacagacgccatcgagactgcccgcacagccatcaccaacgcatgcaacaccgccaccataaccggcgtagaagcccgccccgaagacgaatgcttcgcagacgttgaccggcccctgttcccgccagtggtcggatacaccgaaatcgctgaaaccgcaggactctcacgtcagcgcatccgccagctcgcaggcaccgccgggttccccgcacctgtcatcaagaccgcggccggcccgctgtttcccaaagccgccgccgagcagtgggcgcggacacgccagcctaaggcaggccgcccaaaactccagaccaccacctcataacacatcccgtgtgctgaacctgttggccggcccagcacacacccccaggggccgggcccagcccggccccgccccacacccaaccgccccctgttgccgccgtggcgaaacgatcaggcgagccacgaccatcgccaagctgaatggagagcgagcatgagcaccacccctgccgggttcgacttcgacgctctggccgagtgggccgagagcgatgaggcgacccacaccccgcaaaccagccccgtgttccggggcaaggacgccgcgcgcgccagccgcgcattcctcggccgaggacggcccaccctcggctcagaccacgccaccggcgagggccggtcgccccgccgtcaggtacggctcgacgcacgcaccaacgcgcgactcgacgcctacgcagccgcaaccggcaccagcgcctcccagatcatccgcgacgccctcgctgactacctgcccgcctgatcccaccccaatccactcgggcgcctgtcagtgccccctcttctgggtggtggtccggggcgtcaccgccccggaccagttgggtagtcatctcagttgaaataagcgattagtgatacgcccctcatgctttccggtgctgtcatgagcgtctgacaacagcgacacctcggggcagccgacggacagtcctctggctgccgctctgatcccatgcccacggcacgaaggtgtcggacagctcggtctcgtcatgtgcccaaatagcgtcgtgggcctgtcgccaagcttctcgggagccccacacgggcacgaccgggccacaccggtgtcctggtctccagtgtcgcgacactgtcgatttcggtacgtgcaatgcggcggcggtttgacggatcgacatcccagactcccgcgcgtcccagatcgccatgtggagagtatttgcctccagtgcggccgccacacttgcacgctctcgcgcacgctcgaatgcccgcctagtgctctcaaatgtcgtcacgacgcctccccctgaaaatactcagggtgtcccacggtgggacaccctgagtatttcataccccaactcgcctcaccacacgtcgacctcgacaccgatcaagcgacccgtatcagcgacattgccgtaccgctgccccgcctggtcctccagccacgacaacgcatcccgaaacagcccgacgtcttccaaagctaaaccacagtcgtagccgcccttgtcccccaaccgcacaatctggcgctcccggtggcctccctcgtcgacctcgatccacagtttcgcgtgcatccgctggcctcggccctctgacaggatctcggtgagcaggtcggacgcctgccctcgcgcatcctcgttactgcgggggaattggagtatgtgggaggaacggtggtggggcaggtttgtgacctcgtgacgcagcaggttgcgcttgtgcatctgccgttcgagacgctcgggctgacctgttgacggggttgagccgtggcgccgcttcctcggcggggtctcgatccgttgctcttccggcggttcggcgtcaggttgtggtgcgcgatctcccctaggacgggggggctcgccacctatatccgagggacgatgagacggccttccacgcttgctgcgcactttcgcagcccgccccttgcggtcacatcgacgcggcggcggagtgacgtcctcaccgcgcgctaactgcgtcaacgccgccaccaggttggtgcccggtttcagccctttcagcacgaaccgcaccaggcgggggtctcggccgattcgtcgggcaatctcggcttggctccacccttcggctaacagggtgcgcaacaagtcttgggcccggttatcacgctcagtcactggtcgcctcctcggggagtcctgcctgctcggcctgctctgatagagcagcccgttccgatccggtctggggcgctttcaggggaccgggtaggacacctttgacacgcagtcgcccgtccttgccgtcgtcgccgcccccctgggccacagggagcgcccaggggggcacgttgctggtgtagatggcgtcgccgtggatagccagcagggtgcgggagttcatgcgtagtgctcctcccttggttgtggcgttttttccggtggtggggtcggcgatgggtgtgttgagggtgcgtacgcgggacagggcccagatacgggcggcgatttcggggtgccaggtgtcggggtcggggcggcggcgggcggtttggtattggtaggcgatggtgtcaccggttttgttgcggatgacgtcgaagccttcgatgtcggaggggatgtcgtcggcgtcgtagacgacggtggtggtgacggggttggaggccgacatttggccgatggtcacgcgcagcatgtttttcaacgcggaggtgaggattgtcgtggcggtggggttcttgtctgcccagcgtttctcggcgatgtcgatcatgtcttggatggttttgacccatcctcggatgggatcgactttggtcagtttgatccctccaaggaactcgatgggcttagtaacgggcccgtcaggaccgaattcggtgtcccagccttcgtcgatggctagtttcagttcggcggcgtcaacccatgtttcgtgggtggtgccgggcacgttgggccaaaaccatcctgctcgtcctttggtgcgtttgaccggtagtaggccgatgtcgtcccaccaggatggcacggtgaagcggatgtggtagcgggccgggtgccaggggttgttggtgaacaggtcgtgagcttcggtggcgctgagcagagtggcgggtgcggcaccgatctctccggtcactgatccggcatacatgaatcggccgtcgatgtacacgaagttagggatagggccggcaggcacggtggggcgccaaccttgttcgcggtcctcggggttgccgtcgtcgacgcatagttcgtagcggtgctgaggggaggtgtgttggatgagtgcgcccagttcggggtccatcggctccatgcgataggactcgggggtccgtagcttccagaggttgattccttctgctccggggcggtccatgagggcccagtcgcggtcgattctggtggcgatgatgtgggttaattcgcgccatgcccagcgggcctggattggggtgagggtctggccagggaaccattcatcagcgaccagaatgtcgaggttgcggtcggtttctttgtgggtgaaccggcctcgggcgggccgcccggacagcatgaacaggccccgcacgtgccagtcctggttgaactcgcgggtgtgagcgggggtgtcaggcagcagccaggattgaggctggtcggggatgttaccgcagacgatcaggcgtcgggcgttgtggtgtagcgcggttgttagcaggtctgacagggtcgcgtgcttggtgcgccgcccccctagcactggcaggatctcgtttccggccgcgtcgactccccgggcggtgtcgatgtctagccacactgtttcggggtcggggggccgatgtggggcgggacggcgctgctcctggtcgtctctcatggtttcctcctttgggccagggagcggccggcgtcgagggcgttcatgcgctcgcgttgttcttcgcgtagttggtagacccggcctcgtgacactcctgctgcctcggcgatggtggtggccggcaggtggccgatggcggcagcgtcggcaaggacgtcacgccaggccaggtcaatggttcccagctgggctagagcttcgtcgcggcggcgggtggcatcagccactacggaggcccaccctgtggggtggatggtcttgacgacgattcggttgtggcggatggggccccatgcatcagcggggacttgccagccgtgattggcggcggactcggtgatcttgaggcgtcgctcaggtgcgcgggtgcgggcagtgacgtcggtgttccaggtctggactggtacccacgtcccctctcggatgcgttcgatgacgcacgtggtgacctcgtcggtgactgtgatgaccagacgataatctttcccgtctggggtggttcggtagctgggcatgtcaccctcccctatctgtcaaatgagctagacacagtgtctatttaatttgacgcaaagtcaagtgcattagacgcctttgtgtggatccgccccaccagacaaacactcgcgcctcatgacccgccgcgaagccttaacgaaaccaaaccgcttatagaaccgctccgcagcgctccccgagggctttagctccaaggtaagaccttgctcgtcggcccattggcagacttgtgtgaggatctgtgagccgtagccctgatttcggggggcggcatgcacgcacatcagcatgtgaccatgacggcgggtcggcgggctgacataagccccaccacgccagtccggtgtgatctgccaacttcgccatgccgcagcgcgccagcggcgggcctcggtagccaccatgatcaccatgatgatggacagggttacgacgccgactatggtcagctcactccagccaggccagttcccggagatgatccagcctcccagcgcccagatgatcatggcttccacgcccgccgcaatcgggacgagtggggcagtacggatgcggcctgccatgatctcggtgatctcgctgcgatgccatgacaaggagaattcccacgactcttgaatcatgctgatgtgtgaacggcttcctcggcttcgccctgccatagcttctctagacggcgctcggctagctcgtcggggcacggcgacagcctgccgcactcggagcagaccccgaagtggcgcgagagagtgatgaccggctcatcgggagcatgaaccgattcaacgaccgggtgctgctcatcggtgagtcctgaggcgtgaccaatctcggctagacggaggtgaaccataccgtcgtagtagtcgaggccttcaacgtggaacgggtaggagccgtccgcggtgtggcctgcaaccaggtccccgacttccagctgactggcggtcatggttcgcaccggcggcagcggggtccgggtcgcgttgatcctcatggtctctccttgcttctgcgccttcatagatgaaggtgccacagccggggttgatgtgcggaaccacagccactttttcaataaatccatcaccacggtctcaccccttcccaaatgtgtaaaccgtggtttacgctttaaggcatgatcgaacacacaccgacacccgccgcgcctcgcgtggccatcatttcccctagcgggccaccacggttcttggccgagcctcccagcgccgcgctgcgacgccatggtcggacccgcatgaggtcccttcccctatcccctcacattcgcgcctgggtctccaccagcggccgtaaacccaatcccatagccaccgccctgatctggatgcataccggagccctgctgccggtgtgggacaccgccgttttgactgggcctgccctcggcagacgtgtgcgccctctcagcagtgacgccgaactgacctctcggcggtggctcgaccaggttgccgaccatcccggctttctcgacacccttatcgaggccgcccgcatcaccgatggatggcatcacgcgacgcctccgcacattcaggccccttaccggacccttcatcagtgaacggaggtacaacgacatgaccagcgacattgacattgaccggacccacaaacccgacgaccgcgccgaggctcctctttaccggtcctgggccaggagactcgtgcacgtctccgggatgccctggcgtatcgtcgccgccttggccggggtctcccccacctccatgcaccggcttctattcggccgcaacggtcgacccgtggaatggatcggcatcaatgatgctcgcgccctgatggatatcggcatcgatgatctcgcctcagcgtccaccgaccgtatcccggcccgcgaatcccgcgagctgttggtagccctgcacaccctcggctggaccgatgagcatctaagccgctggctgaccagttccgacctcgacctgaccaccgcccccaaagccctctacgtcactcgactatccgccgcccgcatccaggccacctacgacatgctcatcagccagcccgtccgccgctgcggccacccccgcaccccgcccgtctcgtccccgacccctgctgtcctaccccagcccagacccaacaacaccgaaccgttccaacccgccctgttcgagctggccgactgcgcatgaggaccctgcacagacgtgattaaatcgaagggctcaaccagtcatcaggagtcccccgtgcgtttgtaccgcgctgttctcgccgacaccgacatccatatcaccatccgtatctggaacactaccgatcgtgactggacctgggccccccttgacacttgggcccccgacccggccccgaccacaccagcccagttagccgatgaacttcaccgtcacggatggatcacccctgaggtccctactaccctcaccgaggtggctgtcatccccgagaactggcaagctttcgtcgagcatgccctcgctgtccggaaccagcaggctgaccaattgcgcgtcgccgagaacatcctcaccgacatcctcggcgacgccgccgacgccggcctgtctgtcaccgctctcgcccgcacgaccggactatcccgagtcgccgtctacaaacgcagcgccaaaaccatcgactccatgagacacgccacccaggccggcggaatcctcaccccctcctgtctcacccacgctgagagaacagcgctcggcctgcccgacgagtaacccatcgtttacatcctcgactggtccctgcgaccagtgaaccgtgcccccactgcgcccacaatgatcagcacacccacggcgatcatcaggtgggcagcactaactgatcccaacgaaccaagatcaaacaagccctgcccgggagcgtcgagcagtccgtgggcgcgaagccatgctccgagattgccaatgatcttggggatcatcttgttcagtagggctatccctccgatgccgacaacgaggaagacgaggatttcttcgcctgcgttgtttcttcctgtgtttgcggtcatgctgccttctcggggtggatggccagccagctgatgaggttgtcggtgatctgccctgagatttggatcagttcgacttgcccggcctgccatgcccgcgatgtgccggccagcaatgatgctgggacccctactgcgcggccacgggatgcaacctcagccaaggcggcgcgtaactcctcgacggtgctttcgatgtaccaactgccgtcagtactagtctcagcggcatcggtggtagcgataagagcatcggtgaggtcgtcgacggcgcggtccagatcagcgatgtccggtagggctacaggagtcatggtgtgtcttccttctagggtgccttcactggtgaagggtccctagccccggccgatgtgcggtgctgtgggaaaaatgcttcccattggtccgtcttagttaggaaacttggcctaagtgctgtcgagggtcgcgtgttcgtgaccggttcgaagacactgccgccttgtcttcttgcccgtggcgcttccgagatggtcagtgggcgatggctaggccgatgagggcgccgctgcacaggctgggcgcccagggaaggaatcgggtggtgtggtgtcggaaccggtcgattagggcatatagggcgatcagggtgaggccggctatgacagtgacctggatcgtgtcgatgccggttgctgcggccggggctgcccacagtggtgtgatgcgcacatcagagaaaccgaatccgcctcgggagatgagccaggcgatcatccacgctgcgaagatgatggcggtagcgatgacagcacgtatcgccgcagtatggtccgagagggcggtaacgactacagccccgatccatccggcccatccggtccacgctaggactgccggtatccatgtggtgatggcgtcaatgacggcaacccatgccccgatggtggctagcagagcccaggccggccaggtgggtgctggggcccacgctacggcggcgatcatggttgtcgcagatgcagcacagacagcgatcaagcttcggaggctgtaggtgtcgcggtagacgatcttgtcgggattggcggtagctggttctggcaggacgcgggtgagggcaggccatcctgcgaccgcaatagccgcgacggcgaccacccacacaatctgttgcatgggtctcatcatggcccatcatcgatgagtatgggtggccgacatggggtcactcgtagaggggatcgaggggtgtgcgggcgagcatggcttcctgtgtgccgagcatgagggtgccagaatcctcgccagccgattcccagtcgacgatgacctggtcgccgtcaacgctggattcggcgatggtcacccattctccgtcgatattgatgagcaccccagcggccagctccgtggcagcaaccgggtgaggtgggttgtagaagcggtcgatgtcgcaggcagggtcgtcgggttcctcgactaccggaggtggggtcgatctggctgtctcggtgtcgtcggccaggtcggctcccaggatgcgctcccattcggggctggttttcttgcccgctgaggccatcgtctcgtcgatctgttcgtcagtgggccacacaaatttctttttggtccaggtcgtggtgtcgggtcgcagctgatccagcagttccaggtcttgcggggagtgggccttgcgggggtcgggggtgtagaagaattggacttccttgggggctgattcgccggataggtaggtgccgcggccgcgtttgccgaacgggatgcccacgccgacgtgttcggagccgaacatcatgcgggctccgtcagcggacaggggtccggtggcggcacgcccggagaagttgtctcggatttcgccgcccaggaactcggcgtcggggcgttgggtccccagatcgacgtggatacggcaggcggctgccatgcgcagcagggagccgatccagccgaaaacggggcattctccgggcatcccagagaccttgatcgttgaccaccagtttttcgcgttgccgtagaactggcggtactcgtcgatgaggaccagcacgcgggtgaagtcggtctcgcgggccccttcttcttcgatgcggcggtagcggtcctccatgagagaccacagccagtggatgagggcgacctggtcggggacggtagtggcgaccatctcgatgttgggccactcccgcaggcccaggtactcgatgcgtttagggtcgatgacgaagacgcgccagttgcggcgggcaccctcgacggcgtcgccgatcatggacaccgtttttccggtacgggtgcggccggccttgagctggtgggccatgacaccggagatgtcccagaaacaggtgttgccgtcctcgtcgacggcctgggggattttctcccagtctggggagtctgggcccggaagggccacgggtcggggcaccatcgagggcagggggtggcggcgggtgacggtgatggtgtcgtgttccaggtcgaagtcgctgcgccactggccgagcatcatcgccgaggtcaccgcggccaggcgcaattggatgttcgggctggacaaatgggcgccacgttggtggtgaatggtgaagccgtccaggttcccccgatcggttttccaggaatcgacggtgaccgccgacccatagatctgagtggctacttctttagcccgttccttgtctcggtccagatcggttttgtcagggtcaggggtcggggcgcggtattgcaggacgaaccggccggccgggatcgttgcggatgtcaccgtgaactctgccggcgaccaggcagccgcggccgcctgggtgagggccattggcatggtctcgacggcagcctcctcgggggggatggtgagggtcaggcgtcgcggatgcgtcttcttgcgattccatgtgactttctgcctcaccggcaccttcgccgccgactgaatggctaggcgagctgattcggcagtttcggtacgccggccagcgcgtagcgcccgtcgtgcgtgaaggctgcccaccacagcacagcccatacacggcagccacgagcgcggatcagcggctgctgcatagcccccggtagctagtaccgcacctgaccagccggccgcgatacttttccacgccggtttcgcgccaccaggaccagcgttatggacggtctgcttcgaggctgcggagggacgagacagcggagtgctggtcatgccgcggcctccttgtggcaggtcatttcacaggcatgccggccagcgatgatgccgtggcgcaccgccccggtagccgcatagaccgcgcacaactcaaacacggggcacccatcgcaggccgccgggttcatgctttctttgtcccacgatggtgggtcatcggtgcacggcacggccaggccatcctgttgagcggcgctgatagcggtgaataggcgcagctgggcgcgaacttggtctggggtcaggttgacggtgcgggctacacgcatggggttccttcctcttcaccagtgaaggttccctagacccggccgatgtgcggagggatttcagtgttttatcgaggtgaccagccagccggtctgcgctgcgggttcaggtaccagggtcagatgcagcatggtgtggtcggctaggggcacggcgaccaggggcccgtcggcgctcgccccggtgagggtgggagttccggccacggtggtggcgggaatctggttgggtttcgcggccatcagggagcccatgagggtcggggcggcgatctggacgagggcgactttgcgggcggcgggatcgcgggtcaaccagccgcgggtgaaggtgagcgcagccgacgtgatatcggggctcagcggggctggtgtggcggcggggtgggccgttgaggagggccatacgcgcggtagcgctggcgacatcgagcgggtcggagtggggtcaggtgtggggcttagggtccgatgtggcgatggggctaccgccccggtggtgggagacgagactggttgggggtggtgttgagggcgtgggatcagggtgaaggcagccaaactggccgggatgaggatgacggccgcgccgacacttcggagcgaggtcatgtgacgatccttcggtagctcgacgggttgccgtagatcttttccacgttgatgccactatgtgggttgtcggcgctaaccatttggcctccaccgatgtagacggccacgtggtgggcagggcttccccagaggatgaggtcgccgactttgagctggtcacgggccaccgcggtgccgactttctgctggtcggcggcggtgcggggaaggctaatgccgatacgccggtacagcgccgaggtcaggcctgagcagtcgtagccgccatcggctttgccgttgccaccccacacgtaggcgtaggagttgttgtcggcgatcgatttggcccatgccacggcttcggccaggttcttcgacacaccggtctcgttagcggccccggtggcacagttgtttgacaggtgccctgtagtagtggatcccactatttgtttggccatggtttcccatttggcgtaggcatcgggcagggctgagccttgcactgcctgagctgcctgcgtcagcggcatcttctgccagtcagcgatgtcgactaaaccgggaatgtggaatccagggccgccggccgatccggggccagcgtaggtgatggtgtggcctttcaagaacgcctcggtggcgtaggcatcattgttgacctgatccagagtcccgtaccagcccggcaggatgcgctgctgaaaggggccggcgtcaccgtcaccgttagccttcgctgaggtagggtcggccccaagatctgattcttgtttggcggtcataatagcgatgaccgctgcctgggtaggcagtttgtcacgctggaccacagtgacgatggtggtcacgagctgcttctgcctggccgtgaggcctccggcacccacagtgcctccggtgacggtacccacgcaagcatccccgccgacactgccaccgccgacgccagagttgtcgtcgagggccccagagcctactgacagcagcggcacaatgatcacggtcgcgggcaagaccgccaggcccgccagcatcagcactgctgcactcaccacggcgatcacgtgagatgctttcaacgctgcccacctttcgctggtttgagggggcgacgcctgctggtacgcacaggcttggttggtccagtccgccgttggttggcaggcctgggtttgatcggcttgctgggacccggtttgggctccggagtcttaggctccggcttcacatgcctaggcacttcggctgcggtgggaggagtcagcacgtggcgtaccggcttggtgaccttctgggcacccgaaacaaccggcttagacaccaccttggcacctttgaccaccggtgcggctgccttcgcgccggccttcttgactgcacgatgcgctttgatagccccggcctcggcccggccaaccctgctagcagtagcatcgagggctctgtggcccgtcgttgccctcaccggtgcatccttgccctggcgggtctgcttagcgatcgccgacatgccgcctcgcaatgccgaaacatgattgtgggcgtgggcgatcgccgacatgccggccgtcgcgatttttgactggccctgcggggcccctgccccagcacgaatctgctggtaagccgccgacgtgccacgagcacccgccgccattcgcgccaccttcgcagccctagtcactcccgtcgacacgccacccgtggctaccgcagcagcacccgagaccacagtcgaggccatccgccttcgacccaatccggtgagcttgcgaccaccgctgcgcaccatccggcgagcaccccgcccagcccactggccgatcaccgagcccctttcggaacgcttgctgcgcatccaatcgttgatcttgtccctcagccccttctcgcccttgtgacgacgccacatggacatcaagaacccgataatccccacgagctcgagcatgttgacaaccatgaccttgatggcgacatcaccgtcagaggcgaaaaccgacttgatgatgagcatgaccacacccaacatcaccatcgacccgacaatgccgatcatcgagtacaagatcgaacacagatcccggatgagcggatctgtgcggccagggatagcccgcaacacgttgagcatcgacatgaacgccgaccacaccaacttgcacacgtagaaccagcacatgcccgcgaacaccagcaggaccacagccaaacccgccaccgtcgacgagtaaaagaagaaccccaccaaccacgaaccatccgcaatatcgccggcgtaatccgacaacccctcatcacagtcaccaaggtcgtcgcgagcatccgagacgtcatcgtaagggccacccttgagcacctcgatgtacttgtcgtggcacttcgcatcaataatgcggccatagttgagctgctgatgaaccggcgccacgaacgagtccacaatgatcgccgacagcttcggatccttcgagtctcccgtcgaggtcatgtcatcaggaatctcgacctcaccagcggtcgccgtcgcaggatcaaccgaactggtaatcatatgagacagcgccacaccgaactgctgggtgcgagccagcggagtagccaacgtcgtcgtatcgcctgcgaacttcgccaccggggccgccaagaaacccaacgccagcgccgcagcaatcgccgcacgcgcacccgtagcccacgcccctgccgtacgtcccctcatcatcttgacgaccacgcccacaccggcgcacgtcgtcagcaacgtcaacaccgttccaccccagctgtccgctcccagcggggccaaaaccttgtcgtggatgtcgttctgtaaccccaccagcggtccggtaatccacccgacccagctcatcgccacggtccagtccaacaaccggcacaacagggcaatgaccatcaggtacgtgttccaacacatgccaataatggaggcccacatagccttcagcggggccgtaacgccaccatcgtccatcgacatctggtactgaaacaagtgaataccgttggagtcagtcacattgaaaccgtcacccatccagcccagccccgggcccgatgccatggcaggcacactgctcagcgccaccaccagaaccagcgtggtgacgatgatacggaaccgccgctccccggccccggggcggcgtggatgacggctcacgctgtctcctggtcgtgctcgggcgggttggagctggcggcttcgcggtggggagcgtaggcaggtctcagtagtcgaatttcaccgacgttgccgtgttggtcggcgtacaggccacaaccggggcctccggggttgagggcaatcttgaccaggtcagcgaactcttcaggggacgttttagggtccacgcccaggaactcgacacctttctgggcgaggttgatgttgtcgcacagcaacacgatgcgatgctgaatgaggttgcggacggtctcgttggggtaatcggcctcggggtcgtgggagccggtgataagccaggcattggctcggcgggattcgcgcacgtactcgtcaatggcgtgggaggcttccggcgaggacgacatgtgatgaaactcgtcaacaatgaaagcggcgtcgcgggcccggtcgctgaagcacaccaggcgagccagacgggcaatgagcgcgtagagggctcggccaaacaccttgtgcgggggcagctgccgaaacagatgttctgacagcatctcctcggcgttaggaagagcgatgccacaagtgccaatgatgaggatgtcggcactcaggtcggcgggaggaaggtccgggtcaaagatggccgaagctagggaggccgagttctcgatgtcagcgaacacggcaatcctgtcagcgatcgcggtggcctcgggaaggtcgcactcctcggccaggtggcgggccaaacgcccacacgaggtgatctggtggtcacgcatgtaggccggtttgaggaccttggccagcgtggtcccggccacaccgatggtctccaagttaagcaaggtcagcaagaacgactgggcgacctgcccggccatctccgggggaaggatgcgcagcgggtccagcgacagcttggggtgggccgtgtcgacgatctggcgtctaaccccgtcgatagagttgacaaaggttacccactcccgctcatcggagttgtcggtggcaataatgcgcccgccccgggccgcgatggctgcgcacagccgcttctcggccatcgtcttgcccgcgcccatcttgccgatgaacgccaccgtgttgcctttctgatcctgagtgtcggcatgcaaatcgaggtaggccagcgactgcaacggggagcctgtgaccacagccaacgggatgccggtggtacggcccaaccggtactcaaccaccgggatagatgcggcgaacgcggaggcgtgagtcagctgacggtaggcgttaagcgaggaggagaaccggccaccgggccgggcagcccacagcaagtcctcctgacggcccacgggacgcacccacgtgaagtcaccgaacaccggatcattgacgaacgctcctgccagctcctcggtggtctcaaagtcaggagacgagacagtgacggtgataagagcctggatctcgacctcacgctcatcggcggccagctcggcgttgtagtcgacgagcacctgagcggaatgctcgatagacatgagggtcgaagcctgggtcatctcaccgccctcgacgttgtcgagctgatcgaccgtttgacggatagcccgctgatttttctgcatcgcagcgtgacgggtccgggccactccccggatcgccacgtcgaccggcacgccagtgtcgtcgatacggcccaaaaactcgtaggcaggccacgtcatcgtgcggggcaccttacccagcacgatatgggactggtagacggtctcgccggtgtcggcaccgattttgaggacgcgacgattccacgcctgagccgtccgggacatgtgggagactcgcttgtcatcctcgctggccagcaggtcggaggtcgcggcctcatcgatgaccaactcccccagcgcggcacgtccaacctcatccatgagggcgattccctcgccaggggcatcatcacgcaaccgggtcgggtggcctgacaggtgctgccgaagccagatctgttcatcaacggtgaccgggcggggttggaacgctgccggcagtttcgcaccgaattccttagcctgacggagggcccactcccgtgcgacacggccaggagcggtggtcatgagtccggcggcttcggtgattttgttgagggcggcggtccaggcggtgtgggtgcgtattttctggtcttggttgagtttgatcgataggaaccacacgcgccggcctagggattcggtttcaggctggtcgagggtggcgtcgatttcgtcggcccacacggggtgttcgctcaggtcaaggccggcggccatggcgtcgacgatttctgtggggtcggtccaggtgagggctccgttgaggcagaactcgtggcgggcgaggtggcggaataggtcgcggtgagctgcggcgacggtgagggaggcgttctcggtgacgggtcgctggaggggagtgagtcgccaggtggcccagatgtcgccggtggaggtccagacgaggttgtcgaagaggaaccgttcggggatggacatcatgactccttttcggcggcggcgaggaaggcttccaggccgctgcggcgtacagcgttcccggtagggtgcaggggttttctgggggtgggttcagatttcgaatgtgggaggggtttgtggatggtatcggtgtcctcggcgagggcttggtcgagcaggcaggtggccggggtgtcggtagtctcgtccagctcgtcgatcatctcgtcgaggaggttgggggtggtggatgcggcccacacaggtgggatagccggtgcgggtcgaggcggtgtggggaggcggagtttggtttggccccagaggggtgtgtgggtcatgccggcgggagtggtggcggcgtgagtggtcacacgccaccagcccgccagccatgccagaggtgaccaggtccagtcgatgcgaccaacaacgaactgggcgagccatccggcagccagcgcgaaaatgaaaccgcggatggtcatgcccccgtcgataattttgaagcccatcatcgcggcaggaactacgccgccgacagcgagcacctgatagatcgtgtagggcccgccaggaatccttcgacctgaggaatccttaccgataatgcggggctgctggcgggcctcggtgtgccactgaatatccacgatcagctcttgcccaatccttgcatcatctgtccgaagaattggatcgcgttaccttcgataagccagtgcgccataccacacacaaacagcatggagacgatcttggccaggctcataccgtgtttgaagatgttgaacgcggcaatgcccacgactacgaccatggcgacggctcgcaccgcggactgaccttcacctgccttgatcgtcgtccattcgaagaggttctgcgattccagtggcagcaggaggaattgatcgagcatgagaggttttcctttcaggaagccgaccgggatggtcccggtactgacgggctggacggcacgggtgtgccggccaggggcagaaggcgtgacggctggtcgagggaggcaacctcccagcggcctgcacggctgacaagagtcaggccgtactggctggtccgggtagtggattcgtcgccggtgggctggcatgtcacggtcaccgtgacggtaatcttctgccggtctgagggggtggggacctcgtcaggtcccaccacatgagtggttttcactgatacgcatggggctgggtcaaccgcggtgaaagcggtccctgggctgctccatctcgacaggtcggtattcccggtcagcatggcggttaggaagcctgaagaggcttgggcggccgggtcggcggtgcgaagctccgaggtgtctagggtgggggctgaggccggtgcaggcatggggatctgtccaggtagacgcaaggcgatggccttgccgttggaatcgacgtggaccgggactgaccaggcctgtccgctcccggattggccgcccatggtgaccacggtgacctgccacaggctcggatcagacggggagacggtagcgtcataggcggtgacggtggtgggcgctggaccaggtttgcggggcatgcgcgcatcggtgatcttggccgccaccaggtgttccagattgtccaagtgcccggagtcagaggtcagcagaagagtagtcacctcgaccgcggtggctgaggcgatctgagctgtgcggcggtcgtgatgggtggtgtcagtgctgacagctgtggtgggagcggatgccggggccgccgaacggaccagggcaacggggccgcatgcgactccgcacagcacgagggcaaggaagcctttggtggccatcgatccggtgtggggccagggacccacgttttcctgtgcctgttttttcttggccgaccaacggcgggacttagggttagcggatgcaccttctggggtgcatgctcgtctcaatcgcatcggtcacctccttcactggatgaagggaccaaggaggtgaccgatgtgcggtcgaacccgaaaaagttcaaacttttttctgggtctgcctcaagtacgacagaaggcctgcatcatcacggcgttgtggtagcagatcttgcgtcagcgcaaatgtatgggcctcgtaggagtagctcttaggtgggtcccggtggttgcggccagggcgagggtgtcgggtatgtgtagcgctagtcccgggttcgtggtgtgagggcttttgggtgctgacatgcactacccattgctagacgctgtgctgtggcatggctggacgtctagcagacgggttgacatcacctttaggctggcagcgcccgaggccgcaggccagaggaagcggacagcctaacgattgacgtccccctctcctttccccaacctcctggagtcgatgacccggagatagatcgatgtctatgcatctgtgcatcgatatacctatgtatctgtctgtggtttttagaggccactcccgtcgccccgggccgctcagcgataccgcaaggctgtgtgggatcagctgtgccgctctcccgacatggcagacagcaccctgcggactgactgacactgtggcgccgcggaggtctcccgcggcgtccgctggggcgagtgcatgcctgtcagctcatcttttatcgtcatgtttccccttgtcagagcggtctttgcaaagtgacaacgtcaggggtcttgacgacaacatcctcgacaacatcgtggcggtggtctgtgtctcgtcagttcaacgcaccggggaaagaggcaccgctgatgttcaccaccacaaacaccctcaacgatgagtgggaccagattcgcgccactgagatcgattggcatgactgccctgaactgatgcactgcatcgacgttgatgatgtgttggccgtcattcctgccgcccccgacgccatcttgggctacctcattgcccgggctcagggcggtgacgagttggccacccgcactatcatccaagcgttcacaggcaagcttatcttgatggccacggccaccaaggtgcgccgtactaatgacggcttcaatgatctgttggcgggtctgtgggagacgatcatcacgtacccgttggatcgtcgccctgacaagatcgctgcgaacctcatcctcgacacgttgcaccgggttacccggttctggcgtgctgattcccccgatgaggaagaggctcacggtctggtgcccttccctgacactctcatcgccccagagcccgatgaggacgtcacagctagccaggccatcgccttggcggtggaccgcaactggattaccgaggacctagcccgcctcatgagccatatttactgtgacggtatgactggagctgatgcgggtcgtctgcatggctgcgctccagctacggtgcgatctcgatgccgtgatggtcgggccgtgttgcagcgcaacgccgagacgatcctggccgtctgctgatccctctcttgctcatgcctgccgccaccctacccctacctgctagaaacatagccatgtctccagcaacgcatctagcgtatcttctagcaattgatctagctatgtatatagctgatgatctagctaccatatagctgtgtctccagcccaaaggacagcccaatggcatgcttgccacaggaaggtgcgtcagcctcccgaaatactggaaggagctttaccgtgcaggacatgacctcgaccagaccgattgaccgatccccgttcgaccgcactattgcggtgtggaaccacaaaggcggcacgttcaagacgtccgtcgtggcgaacctgggatacctgttcgccgccggtggcaacaaggtgctgctggtcgacatggacccccaggccaatctcgacattgacttcggtatacccgcgggagaacgtgaacggggcatgggattagccgaggcgctacgtgaggggacggcccttcccccaccgcagcatctcagcgaaaaccttcacctggtcagtggcggcgctgctctcaacgagttcaccgaccccgcatccttagcggccatcctcgaccgagtcaccaccgcacgctacgacctgctagctcaggcccttgccccgctggcctgggactatgacctcatcttcatcgactccgggccggcacaaactctgctgtcccagaccatccttggagtagcccgctggctggtagtgcccacccgcaccgataacgcctcaatcactggcctcgtcgacgttcaagacgccatcgacggggttgcctcctgcaaccctgaccttcaactactcggcgttgtcctagccggcgtgggggcccgggccacccggatcgccgcagataaacgccacgccatcgacacagtgctgggggcaggaaccgttttcgatgcggtcatccactactccgagaaggtgtccgtgctcgcacgccagcagggcaagaccgtcgccgagctagccaacgagtaccacaacacccagcccgcctacacctacctagctaaaggccagaacatccccaacgtcgccaaggcagccgtcagcatcgaaactgattatctgaggctggccaccgagatcagcgaccgcatgttcaccagcgacgagcaggagcctgatcatgactgacgatccgactccatccgagcagaacaaccccaccagcgacgacatgcgcttggccgaagaatgggccaacagcggccgcacagtgggagccctgccgcgccgtcaacggcctcagcgacccacaccccgcaccaccagccaaccccctgtctcgtcccctgacacaccggctccgaaaaaaccccagaagacccccaccagccagcctggccgtcaacggatcaacgtcaccgtctacgttgtgcccgaactccatgagcggctgcgctcccgatcggcggcgacgggggtgacggtctcggatctggtggtgcatgcgttagcgttcgtcgccgatcatgcgggggaggcgatcgccgatgatctgcgcgtcgagacgggccccggcatgggggccggactgttcgatgtgaccccatcgcggccagtaggggtcgccaaaacccagctgggggtgcgaatgacccgccacaacaaggatggtttggaccagctgacccggacgagtggagcccgtgaccgcagccatcttgtgtctgtcgccgtgcgcgactatctcgactccaaccctgtaaagaaaggccgacatgtccgctgatgaaactcctgccgcccggggtgggcgacgctttgatacgaccgtcaagcccaggcgccgtcccatgcttatcgccgccggtatcgccatcgtgatagtcggcgcgctcctcatcactcagttgattcgctccgcccaaaccgagcatcgcgtgctggaagtccacgccgatgtggctcgcggcgaggtcatccgtgacaccgatctggtatcggtgactgtcggccaggtcgacaacgtatcaacggttcccgcagaccagctcgactcactggtcggcaaacgcgccacggcagatcttcgagccggatcactcttgcctgctggggctatcggcccggccgatgtcgttccagctccgggcaagtcgctggtcgggctgaagctagccgccggacagatccctatcggagaccttgctgtcgggacgaagctgcgcctgatccagacgtcggcacccagcggctcatccaccaccactgatagcagcaccaataccgatggccagtcgtgggaggcaacaatggcgaccggcaccaaaaagaccgagcaggtcaccttgatcaacgccgaagtgaactcgcgtgatgccgcccggatcgcccaactgacgtcacagggccgtatcgccgtagtgaaggatccgatccgatgagcaccattgttttgaccagcgtctcgggagccccaggggtcaccacgacagcgatcgggctgggcagggtctggccacaatcgagcctggtcgtcgaggatgacacccaccacgccatgctggcgggctacctgcgagcctcccagcacgccgaaccgaacctggccgcagtggcgaacctgacgtcgactccaaccaacgcccaaacggtgtgggaatctatcgccagacccctacccaccgatgacccagtcggcgggctgcgacgcaaaggcatcctcggcccgcccacgccgtggtctcgcgcaggcatcgacccccgatggggattcatgctggccctgtggcggcaactggaggaggctggcatcgacaccatcatcgatttgggtcgcctagccacaccactgacctcaacgccacacctgatcgccgcacccatcgtcgaggacgccgacatgatcttggtgatgatcgaggcgacactacgcgacatcgccggcgcccgcacgatggtggagggactcgctgagcagatgaacttggccggcgcctaccgacgtctcggactgcttgtccaccgtggcggccaggcccgcggcgtcgccgagttcaatgacaaggagatcacctcggcgttacgactcccggtcatcggggccattacccacgacccggccggagccgcccaactctccgacggggtcgggcagcggttcgacaagtcacgtctggcccactcactatcaaaggtggcggccagcctcgtcgatgccataaacaagcgccacgctgatgacgaggaggatctgtgatggccagttttgctgataatccgttcgacaagctgcgctcccaggatgcggcaagagcttcggtagagcaggagcctgatgccggattagcgtcggagttgttttcgacgtcgtcggggtgggccagctctcagcaggtgtcccaagctcaaccggtgatgacccgttcggagaacgtggattggccggttgtcgcggagctagccagtacggccactgatgaggttgaggctgagatcagcaggtggagttccactcatgatggggtggcgacgctagacattcgccaggccatcgcggagcctgctattgcctcggcggtgtctacgtatgctgaccgacgccagatcgatgtaggggagacctggcctgatctggtacgccagcgataccgcaaggctgtgtgggatcagctgttcgggatggggcggttgcagccgctgttcgaaatcagcgacgccgaaaacatcatcgtggtgggtaaccatgaggtggttgtcgaccacaacgatggttcccggtcaacgctgccgccggtggccgactcggatgccgagctggaatcccagatcgcccggatggcgaggaatgcgaccccgcggcgagccttcgacgccgatcacaccgatgtgacgatcatgcaccaacagaagttccgtatccacgcgatctcttcggaggtgtcgttgcaaccgtcggtggtcatccgccaacatttgctcacccaaatcagtctgggggacctgtcccagcggggaatgatgccggtggaagtggcccggttcctcgatgaggcggtacaagctggcaagtccatcgtggtcgccggcgagcagggggcaggcaagacgacgtttttacgagcgttgatccacgccattccgatgcgggagcggttcgccacgttggagaccgatcaggagttgttcgctcatctgatgcctggccgggaaaacacgctggtgctgttcgcccgtgatggtaacggcgaggtggatccggcgactggcacccagcacggcgctatcgagatcgcccagctgattcctcctagcctgcgccaggcgttaactagggtcattgtcggtgaggtgcgcggcaatgaggcttcggccatgttccaggctatgcagtcggggactggcactatgagcagtatccactccccgcgagcctctgaggtgccgtcccggctagcccaaatgatttcgatgggcccggtctacgatctggatcaggccatgctgcagatcggtcattcgatcgactacatcgtctttgttcgtaagcgtgacctgcctgatgggagccggctgcgatttgttgagcagatccgttcagtctcgcctggtgattcgacaactcccagtcttggcgaggtgtacacggctgactcgtggacaggccagccgcttacgccactcatgcctggttcggccgccgacgagctgtctcacttcgcccgagacctggattactgcgaggcccactgatgaacaccccagcgctgatagcagccctcatcgtgaccggcctgggactgatcatggccatcaacggcctgatcccggccacacccaaacccggcaccacgctgacgctgtcacagcggtgggcccgggccacccaccgcccagccggggcagccgggcgccgacgcgacctgcgctgggcgctggccggtctcgtcggcatcgtgctgttcgtcctcacaggttgggtcgctgccctggccctgggccccatcaccgtgctgctagcacccaccctgctgggggcggccccaccgaccgatattccgctgatggaggcgttggatcggtgggtgcgtcaggtcgctgcggtgctgccacaggggcgagacatcatcacagcggtgcggatctcacggccgcgggccccgaagctgatcgccgggtcggtggatcaactggtgtcccggttggatggccgtatggagccgagggaggcgttccagcggatggccgacgagctggactcggctgaggctgacgcggtgctggcctcactagcgttggcggccactcatccgcggggagcctcgacaacgttgaaggctattgctggcaacatccaacagcggttgaaagtgctgcggcaggtggaggctgagcggtctaagccgcgtaactcggtgcgccagatcacactggtcacgatcgccatgttcggggggctgctcgtgatcggacggtcgtttctggccccgctggcgacccctcccggtcaggtgctggtggccgtggcggtggtcatgtatgtcatcgcactagtgcagatgtatcggatggcgcggccccgtcgacgcacccggatcatggtcaggaggacccgatgaccattactgctttgtccctgctggccggggccatcgtcactgtcggactgctggtcatcgtggcagcgttccgcccagccccaggccctgacctggttgccgctctggaggtggtgtcgggtcgcacctcaagcgtcgccgagaacgtcgaccagacccggatcgggcggataggtcgcagcgtgacccgcacattccatgtgtcggtgtccccggccatgcgggccgcactgcgactccaaggcacgacccccgaagcgttctacggtcgacgcctgatctgcgcactgatcggggcgatcctgccgtggctgctcaacgcggtagccatcgcggtaggggcgaattccccgaacctactcatcccttcggcgctgtgtgtggcgttagctggcgctggatggatgctgccggcagcacggttgaaggctgcggccgggcccaccaacgatgactcgttcgaagcgctgctggtattcatcgatttggtcgtgctggaacggctcgccaacgaaacctccgtcgacgcgctcaccaatgcggcaaacatgtcggactcgccgctattcgtccagatccgtcaagtcctcaaccgtgcctccctggaaaacgtcgacccgtggaacgggctagaccggctagccgaggacatcaaactgcccgaactcaccgatgtggtctccatcgcccgcctccaaaacgaaggcgcctccctcgtcgacagtttccgggcccgagtcgccgagttgcgcgacgcctacctgctgcgcctgcaacaagaatccaccgccatcacccagcggcttggtttgtggacgatcctgcaagccggctcggtcatgctcatcttgctgggggcggccgccctcacactcatcacagccggataaaccgacatcgtgtcgagcccccatatgggccgcgaacctttcataatgatgcctgtaagcaccacaatattgatcacaacctaacaatgaaggagaaatcatgatgaccgatctcgacctggctaaaaaacagatcacctggctggcggcgcacctgcgttcccggatcgttgacgagcgtggcggtggtagctctaccgtggagacactgatttggattggtgtcatcgtggcgctggtgattggtgtgggcgtcggggtgacggcctatatcaggtcgaagatgcctcactgacgacgatgcgtagcaggttcacaactgatcagcgtggcggtggtagcgcgtcggtggggatgctcctgctgatgcctgcgatcatgctgctggcattcggtgggatcgaggtcgggatgtggtgtcacgcccatcagtcgaccatcgcggcagcccaaagcgccgcggaggctcagcgtgtcgtccatccggtcccggggtcggcacaggaggcagcctcgcagatcactagtcatggcggggtgcgtgatacccggatatcggtcagtgatgacggggccactgtcacggtgaccgtctcaggtcgggccccatcgatgctggggctgcatcttccggctgtgtcgtcgacagcgtcgatgcccaaggagcgcctgtcgtgaggcgaagtgagcgcggtggagcaagtctaagcgtcgaggtgctcatgtgggcgccgatcgcgctggtgatcatcgggtttgttgtgggtatcggccggatgtcgatggcccaggacgcggtgaatggcgcggcgggtgctgcggcccgtgcggcgtcgttggagcgtgatggacagtcggctcagtctgcggcgcagcaggcggcgtcggcgaacctgtcgtccggtgggctggcatgtgcgccgaatgtgagcgtggacacgtcagtgtttgcccgtcctgccgggcaggcgggcacggttcacgccacggtcacgtgtgtcacctcgctgggtcttgggttcgggtcccggacggtgcacgcaacggggtctgccccggtagacacctatcgggaaaggagaggctgagatggcccgtgatgagcgtggtggcggctcggtgtcggtgtggatgctgctcatggtgccggtgattctggtcatggccggcctggtttttgacgggtcccgtcagatatcggcaacccaggcggcccaggacgcggcggttgcggcatcccgcgccggaactgatgcggcagcgacaccgcagcttgctggccacgacggggcggccgtagcagtccaagcggcccgccaggcactatctgctgccggggtggacgggtcggtgcaggaggacgggtcgaccatcacggtgaccacgtctcaaagtcggccgacagtgttcctgtcagcgatcggaatcagccaggtaagggggcatgggcaggcccatgctcagcttgtgggaccgggagaacgcccatgacagtgatacgtcgtatcggtgccctggtggcactgctggtggtgatagccggcttaccggccgggctcgtggccgcaggcgccccgctagtaccggcgggcctgtcatgggcccatgtgcggcatctgttggttaccccagacatgaccgggtcggtgctggtgtggctggtcagcctcatcggctggatcgggtgggcatggttcgccctggccgtcgcagccgaagcggtgacgatgctctcagggcagcggctgcactggcacatgcccggccctcgcctagtgcgccgagtggcagccggtcttctcattgccgcgttcgcggccgcaccggcagccacaagcacggctcacgccgccgaggccacccatgtggcggtcgccgcccaggctggaccggcacacgcggcccccgcccaggacagccccgccaccacctctcaggccccggacgcctccaccactccgaaaatctggaagacctacacggtgcgggccaacgactacctgtggaagatcgccgagcactactacggtgacggcgcccaattccgtcgtatcgccgaagcctccggtatcgacccgcactcagagctgaaagtcggccagaaactgatcctgccggttcctaagaacacggccgcagttcattcggttaaagcgggggagtatctgtgggagatcgccgagcactactacggtgacggcgcccagtaccataaaatcgctgaagcttccggtatcgatgcccattccgatctagccgtgggccaaaaactcgtcatccccgggcccctccgccacgacgccacgccgccacaccactcggcgtcgacccacgcgaaggccgccaccccagcccacacgcccacgcgacggcctgcgcctgcccacaaagccacgcccgccccgacgccggccaccccaactactccgacccacacggtgaccccagctccggcctctgccggccactcgaccagcgacgagcacccactccatacggataccgccgcagcggacaaggccagcaacgaggacgccctgtccccaatccaggtgggtttgaccgccagcgtcggactggtgctggtcgccggactgatcaccaccctcaaccgccgctaccggacccggttcacccgccagccccgcggcaaggccatgaccctgcccagcccggacgcccaaactgccgagatagcgctgcgcagcaccggggcgactgacactctgacgatcacctgcctcgaccaggcgctccgcgcgatcggcgcatggtgccaccactgcgggcacccgctgccacccctgctggccgcccgcgtcgatgacgaccggatcgacctgctgctatcccaggcggcccccgaccatcccgaggcggtggagctggccgccgacggatcggtgtggaccctcaccgccgaccggatcgacgacctgctagcccacaccgatgacaaccaagcggctccgtggccgtctctggtcacactgggacgcgacgacgacggcgcccacatcctcatcgacttggaagccgcaggaaccttgcacctgatcgccgatgacgaccaggtcgacgcggccctcgccgcgatcgccgtggaactggccacctgcgactggtccgacgaagtcaacgtcaccctcgtcggccaggtgtgcccgggcctagaagacgcactagagtctccgaccctgacccgcgccaccgacgtggacaccctcctcaccaccctagaagctcgcgccgacgaccagcgacacatcctcaccgaaggaaaccccctcgccgctcaccgagccgaccccgccatctccgacgggttcgacgccgaagtgatcctcctcgacaccgaactcaccgaagaccaccgcaaccgcctcgccagcctcgtcgaggctcttccccgcgtgtcagtcgccgcggtaacaaccagccccaccagctcagacgaatggtccctcaccctgacaggtgacccactagccgccgacctggctcccctcggctggcacatccacccccaaaccctctcccccgacctgtacaaccgcatggttgaactactcgccaactccgccgccgcagactacgaacccgccagctggtggaaccacgacgccgacgacgagcccaccaccgaccccaccaacgaggaagaatctaccccgagcaggcgagcccgcccgaatatccgcctgaccaccctgaccggcggcatcgacctatccagcgtcgacatcgacgacatcatcgacgaagccaaccaggccctcgacaacaccgaccagaccaccaaccaggttcgcgtcgacaccaaccaacccggcaccgacacccccttccccatcgacgacatcgacccgctgagctccgaccatccggtcctatccatcatcggccaccccgacatcacaggtgccactggaaccgttgggcgctccccgtggcgctgccaacagttggctctctacatcgctgagcatccgggagcatcgggggcgactatcgccgatgatttggggctatcagcgtcgacggtgcgctcgattgctacacacctgcgacactggttgggagccgacgatgccggggtggcttacatgccggcggcgacgcgcggctaccggctcgatgagcggatcgtcacagatgtggacctgatcgacgctgctgtggccggggcaggcattaacaccgctgagacggccacactggtggccattttgaagctgggccgcggacgggtcttcgctggggttcctgactcggaacttcgccagttcagggcgtcgatgtaccacgtggaggcccgcatcgtcgatgctgccctccaagtgacagaccgggccctggaagccggggacctggggctggcccggtgggcgttgacccaagggctactggtgtctcccgatcatgaggacctggtcaccggttgtctgcgcaccgagtaccaggccggcaacatggacaaggtttccgagctggtcgatcacctgtcggctaccgcacgacgcctgggcgtcgatttgagcgccgacaccacccggatcatcgactccgttattacccatacacgcaggagagcatcatgatctcccgttgcactcatctccgtcaggaaggttcctatgcaccattatcgtcttggtatcggcactgccctcatcgcggtagcagccgtggccggctgtcgctcaacagactcgacacccacaccacctccatcccgtgtctccgccacgacatcagcgagctctaccctcagcccgaccccgtcagccggagcgatcagtgccgccgacgccgaaaacatctaccgcaccgtccaagctaacaagatcgcactgtacaaaaagggtggcctggcacccggggaacccgcacccgcgacactgtcgaactacgccaccggccaggctctcaccgactacatgacctacatgcaccaaatctcggggcagggcatcaaaatcacatcggggaactcctcggttaccgcggtgcgggagaaaaagggtgataccacctaccccgaagccgctatcgccttggaatcgtgcgaagacgacagttcgattcgtaccgtggaccgccacggaaaggctgatcatggacgcattttccatgtcgacagttggtatgcccgcgataagaagggcaccgtcaagatgatcgcattcaactcaacggaggtccccacatgcgacgtcaagtaatcaccgcggccgtactgggcctggccctggccaccacctccctgcccgccctcgcaggcggcggcgacttgaacggcagtgtggacacggatggccctggttacgatgtgcgtactgaggtggattaccatcacaccaccggtggtgcgggtgggggtgccacgacagggggccatcatgggggcaaaacccacggtgatggtgaaggtgaggctattgatgggcgttctcgcgccgatgccgaagccgaactagacgaagccgaccgtaaccaggacttgacttgtgatgtcttgctcccaccggcgccgaataccccagccggccaggaatgggcgaaagaatgcaatcccccagcgaaaaaggggcagaaggccaccccgaagcccgatccggtgttagtgggccgtcacgcggccttgcagctcacccttcccggcgcggcccctcgtatcgatccgtcccccgaccttaaccggtggcactcggcagcagtgggccaggctttgtggttgtcggttgatgaccccaccgccactacgcagaaatcgatcacgtttatgggccaggttgtctcgttgagcgccaaacgtaacggtttgtcgtttgatatgggtgatggtcatgtcgtgcactgtgatgccacgacgacatggacggagtcggtggaaccggggaccccctcacccacgtgcggttacacctaccaacaggcagccccggccgggggctataaggtcaccgcaatcacgtcgtgggatgtgacctggtcggtactaggacacacgggcacagtccacatccagaaggccggtgggcagatgcttccggtcggcgagttggagtctgttgttacacggcgatgactcctgatagtccgacgctgtatgaggtgttggaggtctgccctgatgccactgatgaccagatcaagacggcgtggcgtcgtgccgcgaaagtgactcaccctgatgccggtggcactagtgaggcgttcgcggccgcccggcacgcctgggaggtgttgtctgatcctgcccggcgcaccgcctacgatgccgacctggcgggggaggatgatcccgacgacgaagccgccgacgccttcgacgttgatccgttcacggcatggccctggtgcgccccgtacatcgacgccacccccaccctgcgccacacctgccccggcacgatcaaggccatcgtggtcgccatcgccgggatcatggccggaatcggctggcaggaagcgctggaggccgtggtgtcgccgccggggtttctgggggcgtgctggatagtctcagtgccggttgtcgtcgcagtgacatggctggcagcggtgacgggtctggcatttttcaccatggcggccatctggtgtggatggtcgttgataggtggtgcgttgctgtggggccagacgtcggtggtgtggctgattgctgcggggtggctggcatggctggtgtgtgcgtgggtgtggtggaaccgtcatctggcgtggagtagcgagctgatgcaggaaggcaatttgtacggccttcccgaggaagacccgttgtggggcgaggccgtggagctggtagcgggacttatcccctctgtgcgggcgatgtggtcgcacgatgggcagaccgtgactgtgtcggctggccggcgggtggcgacactggggatgccgatgcggggatggcgtggtatcgagatgcgcggctggaatccagtgggcgccgatacgtggtggatcgttgaccaggtgggtagttggctggtcgatcaggatgagccgatggtcgttgacgggagggtgctccatgaggcgtgggaacggtcgcagatggtccgttcaggccgctgagaaaaaatttaggtccgccctgcatatcggggcctcttcataccttcaaaagtgtgaagggaatacagactcttcgactggaattaaaatggtatatggcgtgtccggtccgcacccagctccacgatgcgccataggggagccataacttcaccaatcgtatacgatatgagtgtaggtgagcatctaccggtggccgacagtcagatacaagcatgggcggatgaagcagaagctgattatgacctcagcatgcttccgccgtctcgacgtggtcgcccaccggtggggaggggcccgggcactgtggtccctgtgcgcttcgacgcggacactctcaaggcgttgtcacaacgagcccctgacgaaggattgaccacgcgttctgacgcgatccgtgctgcggttaaccagtggctcggcctcggctcgtaaacattatcggcgcgacaaccttactgatgacgctgttggttacgccgtagagcacatcttgtactcgtgggcgctcgacgatgctgatgatcctcgttgctggatgatgattcggtgttgacccagctggcctcctcatggagctagttatcctcatctacgacgatggctatgaactcctgatccacgccatgaaagcccgccctcagtatctgagctacttcgctatctagtgttgttgggcgagttgaactcaacttttctccgacgcaagcgccaataaaaggctgatccatccgaataccaccaaacacggctgacgtgtggaacagattcagcaagacagggtgcggtgctcgggtgcgttggggagatgaggatattcaggcttctggcgggatgtggcttgatgacgtccaggatcaccggttcggttttgaaggtgccttgcattaatgtcgacagggtcgtacgactcgaggactggatcgaccagcccgttgcgtctgaagaacttcatccaccccggtggagctccggccgcgtactggtgcaacggatcattagcatgggtagcgtgagtatgccttcgatcgtggtcagtgctgtcatcatccaaggttctgacgggcggcttctcactgtccgtaaacgaggcaccgaggcattcatgctgccaggcggcaagccggagcccggcgaggactcgcgtcaggcagtagtccgggaagtgcacgaagagctcggcgtcgcattgtcttccgacgacctgcgtcgggtgggagtgttcaccacgcgagcagcgaatgaggccggccatcaggtggtggcgacgattttcacccacaccccggttgcggtgagtgagccagctgctgagatcgagcagattcgttggctcgattggagtgtcgacgccctgcctgatgacctggccccgctgctggtcgaggcagtcatcccgtggctgcggcgccgtatccggtcggtcgctgtattcacgggtgcgaaggatggaaccgaccctcattatcgtgtcgaagcaaccgccttgggccggggtctcgcacacgccgggatcaccctggtttatggcggcgggaaggtcgggatgatgggtgctgttgctgatgcggccctcgctgctggcggcgctgtgatcggagtgatgccgcagcacttggtggacggggagatcgcccatcctagtctgactcacctcgaggtagtgcggactatgcatgagcgcaagcagcggatgagtgacctagctgacgcgttcgtcgcgctacccggcggcggcggaacccttgacgagctattcgaagcatggacatggcagcagctcggtgtacacagcaaacccgtggccttgtacgactcgaccttctgggcaccgctgaccgcgctactcaaccacatgaccatcgaaggcttcatccgccctgaggaccgcgcctcgctcgtgatcgccgataccatacatcagctgatggccgatcttgagggatggaccccaccaccaccgaagtggcgctcgtgacatagaacaaatgattctgactatggctcattgacatctgcgcagcggctactagctccattgacttcaaatcgggccttggccgaggctcggttcaggtggcccggaatggatccccacaaattgaatgctcatgatcgaggtgatgaacgcccactctattgtcctacgcccggttgtatccagcgagcaattgaaggtgctgcgcctgttggtcgaccaggccgagccactcatcatcgacgggcgcatcttgtacgaggcatgggacaggctgcaaacagcccgtccggcccgctagaaaaaatttttagggcccgctccgcacatcccggtctgtacccacaccttcaagggtgtgaagggaataaaaacacacctaacaacaactttgtttcatgatttggcgcgtcggaccctttctgaccgatgtcgtgcgcaacaatggacccatgagttcgcctaccaagatgcgccggaaggggacacgcggcccgaaacctcgcagcgacgaggagctaacggctgtgatgttccgcgtcccagagtcagtggccgaacgtgtcagcgatatggcttgggagctgaggctctcccgatccgatcttgtgggctggtcggccctctatgcactcaactcgatgctcagacagcgcggagaggacacgattccggttccggagtatctggacaaggccgtgctcgctgcgttgtatcccgatgggttgcccttcgacgaggacaccgaggagccgggcgagaatgccgggcaggaggagcttgcgatgactggatgagcccgaacatggttgaaggccgccccgccaggcgaccttcaatcaatggtttcggttgtcagctgcagccacccttgccaggtgctgtggttcttctccagaggaggagggaccgccatgaagacccagaagacctagaagatccaaaagaaccggtttcggctgttgcttcggtcttcatggtagctgatagcccgcgtcgttggaagtgcgacgacgccgatcctcatcggtatcgcaccctgttccagggtcgagaatgtgaaggattaacaaccatgacaagtcatgagacgccctcccggagggcgtcatgaccgctttaattcaagctctgccgacagctgaactgtctgctggacctggtgctagcagtccagctagaccctctgctgagggcttcatcaagattcaccacgacctcattagtgcgggcgtgtcgggtaacgcgatggcgttgttcgtcgcgttacgtaaccagcccggctgtgatcagtggacccgtcactcgtacctgcggctagcccaatggtgcggctgggatgggctgtcggaggcggcgggctgtaagcgggtgcagcgggccgctgctgagctcgctagcggtggttggctggaatcgcgggtcggccatgatcgtcgcaccgctaagacgctggtgtggcatcggttgaccagccccgacaccgaccgctgggagcaattgccgcggattgtgtgggcgaggatctgccagatcgccggggagacgtcgggagagtgggtgaggcattggctggtgtggcggatgctggccggtcgtactggtgtggctcaggcccctacgtccatcgtggcccggttcctgggctgttcttcgcgccaggtctctcatatccgtggggctctcgttgatgccggtctgctcggctgtgacgaggtctcgggggcggcgagccgggtgtggttcccctcgatggccgaggagtgtgcagcggatcgtgaggtggtcgatggggccgtcgtcgatgctgaggtgggctctggtgaaggtgtcgaggagggcggggaacccctgtcgattttgtccacccacccctgtcgattttgtccacccacccctgtcgattttgtccgccaagtattagacaaaccattagacagtgaattagaccctgggtcgcgtcagcgtgtgaactcaccaacgcgcgcgcgcgcggcggccgagccgccgaagccaaagaaacccataccaccaacgcctgaaccagcagcccccgcttcagacagtcctgtgtcagcgcacgctgatgaggctgccgagttggcgtggcagttcgtggggtggtgtcctcagctggtaggggcaccgaagaaggtgcgtggccagctccgccagatggtcgctgccgagatccgccggaatccgggctggctggatgcgccagcgttggaggttgttgcccagcgggtacgtgctgaaggtgcgctgggggtccagcactgtgagattgtgcgagccgagctgcacggggtgatcgccgaccagaaggccgcccccgcccgccccgacgccctgcacgcgcgggagcccaagtggtgggacgacgtgtactacgaaggaaacacaaccgtgtggtacgactctgacgaaaccagtgacgacgacgaggcgtggaaccggtcgcaggtatgtcatgttgctgagcgtgacgacatggctggcgggattgctaccaacctgctggcctcccacgctgatgatccgatggcctggctgactcgccgtcaaaccatgctgatggctcgtttcccccacgcccagaacgaggtcatcgcgatgtgccacatcgtgcgcaccgccctggaggccgacatggccgccggaacccggtgggaggactgatgagggtctcccggcgcgccctcatggccgtggcccgtgccgacgctgccgcagcagaccatgccaccggccgatgggtggccacagccaacgccaccgtcgcccggctgaccggactgtgcgaacgcaccgtccaatacgcccgcgccaccctggtccacctgggcctgtgccgcgtcgtggccaccggccgctacctcaccgccgacgagcggcgcacggctgctcgcacccatggcggccgccagatgcgcgccgcctccacccgcgtcctcaccatgtcctgcgcaatcgtttgcgccctaccccgaaggggtcaccactacaggaaagttaagttcctagatggtcaccaacgcacgcgcaggcgcgtgcgaaggccagcaacaccagagaagaaacccctgtggctgcaaaaactcgcagccctcctcgaccagcacctgccctggctggtgagaaaccatcacatcggccgactgtgccacgccctcaccgccctgggcatcgacgaacactggcaacccgcagacctcgacgccctcctcgacgccatgaaccgcaggaaccgtcgcctcggcctcgacgtgccatgcgccgacgaccagcacaaccccttgggactgttcatccatcaggcccgagacaccctcacccacgacaacccccatgaacgccgcctagcccgtgacgctgaacgcgcccggctcatcgacgaccaactccgccgccgcgcagaaaccgccacctgcgcagcccgcctcgcagccgagcacgccgaccccgactaccagacccgccgtcgtgaacgcagggaaaccctgcgagccacactcagggccgcccagcagcatgtcaggacacactgatacccgctcatacgcacaccatgaaacacgacaagccacctgacagtatcagctgcaagacgcatgacaacatagaaggacatgatgaaatacacatagacacaaccccgcacagcagtttcgcaacaaatcatgatagtctcatggcagtatcgcttgatacacacatagcatcactcccacataggcagttatgctgatatactcctactaggttatccgtccaacatgctgagtgggttcctgtacagcatgaaaggagcatggcatgatatgggccgttctcaactgcaagggtggtgtcggcaagacgaccagtgccctcctgctggcggcagccgccgccaagcagggccacaccaccctggtggccgacgctgacccccagggcaccgcatcccagtggtcagccctggcaaccaaaaacgacgaacccctgcccttcccggtgcaagcggtcaacatcgccaccatggaggcactgcccaccaccaccgacgcccatgatctcatcctcgttgacacacccccctcggcaggcgatctgatgttccaggcatgccgcatcgccgacctcatcatcatccccaccgccacctccggacccgacatctcccgaacatgggtcaccatggacgccacacaaggcacaccacgcgcgatcctcctcacccaaaccgaacacaaccgtgtcgtctaccgccaagctcgcactgccctcgccgccgacgacaccgtcgttctcctggaccacgacatcccccgccgtgaatccatccgcacagcatggggcaccaaccccccagacgacgtcatcacctactacctgcccgtcctcaacgaactcatggaggccctgtcatgaccaccaagaaaaccgacccattcgcccgccagaaagcagcagaagaccgcgcccaccaactccaagacgaagcccaacgccacgcccaccccaaacgcgtcatcggccccaccgcacgattccagttcgtcctgccagccgacgtgctcaccggcctcaaacacctcgccctcacccgcggcaccaccgcccgccaactcaccctcgacgccctcgacaccgcctacggcctcgacaccctcgccaacagcgggaagaaaacccacccatgacccgtgggtccccctgccaccaccccctcgacggcaactgtgtgcgagccacaggcccgcacacaggcggcagcccagtgccgtccccgccaggaaaggaactgaacttttctggagtgctggctccctatcaccccttatggtgctatcagatccagtagcgccagcccgagaggaaacccatgagctacatcgtccgcaccggaaatctagccggcacccccgagctgcgcgaggggtagccgacacggcggaccgtgcccctgacagtaagcggcactactggagacatcaccatgaccgctcagatcctcgccccgtgcaaccagaaggctgccgtcatcgaaggagccctgccatgaaccaacctaccccccacaaggccgacgagtcacagacgagcaacaccacgaggaagtggcggcacaaggtgtcgttctaccaagacccggccgacaccgaccgagtccgcggagcgatcctccacaccatgacaaccgaaggcaaccggaacctgagccagttcgtcaacgatgccgtcatggccaaggtgaccgaactggaagcaaaatacaaccacggcgagccattccccgccgtgggagcccgaggactcccccagggcggcgcagccgccaacagataagagggcggggaccaccaatagcagtcgatttcggatccagatcgggtagacaggacccatgatgaatttcatatcctccctgctctcggccatcctgaccctctttgcgatggtagccgtggcgataggagtggtgaacattgtgccgggaatatgcgccatcatcggtgcacggaaatacggcgaccaggaccgtgtgcgggcaggacaacgaaagatccttcttggtgctatcgccttggtggtagcagtaggcattcacccgtgacccacggttaccggaagccccgccgcaatcgataccactgtcagtaccatcaggggcgataggggtcaagctctccttgtcacaatcccttccccggcagcccagtaaccgtcgcttacagccatacatggatatgcgcccattcgtcggcaccgacgccgtgcgggttggcgacgctgacccgtctgctcacaaacgacccttccagcccagcaccacccactacaccgacacgatccacgaagctgaaaccgaacctcccatccccgtccgaaacatcaacgaactcatcaaccccaccaaccatgcatgaacgcacgatcgcctaccggccagccttcctgcgcgacgtgaagcggctcaaaaacaagcactacaacatgaacacacactcaaatgggcggtaaggtcacgaagtcgacgtggctgcctcacggatggcttcggcgagctcttggggtcgactccacatgggccagtggccggttggcagatccatcgcggtgaagttggtcaggtgcgcgacggcgctgaacatcggattgcctgctgcggccagctcgaggacctggacgctgggaatggagcagcagatcaacgtggttagtacatcatggcgagcgctattggacagcgcgacccgtgcccgggccacttgcgcgggttcaggaaccgcccgtgcccggaaccggtcaaggtgctcgttgctgaggccctctaaactggcctgcttgccgagagtatcgaagtcaggaagtggcagctcagctgtttcctcaggtagatctggtgcgaaggcacctccatcgctcatgggaccggagtccacccagacgatccgatggaccaactctgggtgcctgtctacaactaggctcaccggcccgttcgcgccactgtgtcccaccaggaccgcatcgccgcccatctcgtccaggatggctgagatggcgtcagcttggtcgtcgagcgtgcgcgtagtgcgctgggtgtcctccggatcgaggccaggcagcgtcagccccacggctcgactgccagcagtgttcaataactcgactacctcgtcccaagcccaggctccgagccagtaaccaggaacgaggacgataggccgatgctggtcaggtcgcgatgttgaagtcatggagacatagttgcacagtgcgcggacaagggagtggcactatttctggcatgaatttagatctgggtgtccggtgaggcgatcagaacgcctccatgtactgtccgagtgtctacgatgcagcggacacagtcgagcagctggctcacaagtttccaggtgtccttctgcccctatgagggaagtcggctgctctcgcaacctttgagggctgctctggggtcggaaccagttacagatcgttcaagttccgggaactaccgccggtcacgctgattgattcccgggcgatctcgcttctgacgacagtggtcggtaaccgagaggcgtcctactctgaccccgctgctgcggtgagtaaatcacgggcgtcccggatccggccacccgtccaagtgccagccagcttgatcggctaggcatcgtcaaggagcgacgatgaggtgatgatgcgatgtgagcgcaccgcgaagtgaggtataaagaagccttcccgggcgcatgcgtcgcccaggaaggccaggttggcccctggacggctgaatggttgggcggatcaggctgtagcggagacgtgcagtacctcgtaggcgatggcgttggttgggctctggtctgcatcgtggctactgagttcgacgaggatgacggtccaggtggtgatgtcgacggcggtgacgcgggcgatggtggaatcagtggatgctgcaaggaagtcggcggttatgtcttcgatgcagtgggacggagcagtgctggtgggcaggggcacggtcttgacggtcaggcttcgggcagcagagtaatcggcggttccgttaacaagctggtggacggtccagtcctggatcgggtgccggccgaagtcgcgtacgatagccgagtaaccaagttcgccccagcagaactggcgcatcccctctatgtcgcgccagacgtagaagggcgcgtaggagttctggggtgcgcctttgaccttttcttggatgaggtaggccttgaactccagtccatggtagccgtccatgaggtgtccagtctggatgacgcggtcgcggatgatctgcatgtcatagtcggtgggcagggtgatctgatattgcatggcgtacatcagcggttctccttggtttcgtgggagtaggtcgtggggatgacgggttcctgccaatcgatggttgacaagtcgtcggcggcttgttggtaggtaaggtggatcattggctgtttgagtgcagcgccatgccagtgtctctggccggcgtcgatccagatggattcgcccttggtcaggtgctggggtgcttgtccttcaatatggaccagggcaacgccgcccgtgacgtagaggccctgtcccttggggtgtgtgcctcagcggcaaacgtgacggcgtgggcggcacgcccggcgtcttccgtggcacgatcggccggatccatggcggcgcgcagctgctgttctgcagccaggcgtccaggtcacggcgggcagcatcgacacccagggcagcctcgacggcttcagggctacgacgctggccgggctggttgaccgcagaccactggtgccgggcgtcgtccagatcatggccggcggcgtcgatgagggcggtggtggcttcggcgcagcatcgcctgatccactccgaacgtgacaggccagctgtctcggcggcactgtcaatgcgcgccaggagagatttcatgggcgctcatctgtagcctccagataggcgttgatgtagcgcagagcctgatccgtcatgtcgatggcggctgcctcggcagacgacacaacgggctgtggatgataagaccacccaacatagacggcgaacatcaatttctcgacagctttcatgaggtccccggcggcaaccgcatccgcctcatcatccgaggagaaccacttcaggtctgaacggctgtacatagcccctaggtcctgatgtgggtcgaggtccttggaatgatggaagttcctacacacccatcgccaaagacctcaacatggacaacgctaccttcaccactccctcatctgtgaagagccagtttatgcacggtgttgaaagaggcgtcggtctacgacgaatgcgggttaatggtcttgcggtgtggggcgctgggcgatggcatcgagaacgcgtgagtgggtggcgatccattccgcgtcggggttgatgttgcgggcgacggtgtcgatcgctgttacgtagtgggcaagcctgcgaatctcagcttgttggtcagggtgatcgctgatgagaggctcttgatgggaggcgcggttacggacgtggcggatgagctccacgttttcctcgaagtcgcgtcggctacgccccgggtagtgaggcatacctccgttacgtaagtcagtgagagctttccatacggttgcttccaggcgcggggtgagcagaaagcgccagttgtccagtgacagactcgccacgatctggatcaggggtcgcatcgagtcctcgcgcgcccgcagtcgcttctcggccctggcgacgttacgcgggaaaccaccgagccgatagctcggggattcccaccaacgccgtatgccagtatcggcgctcaggcgcacgtcaatgaagtttctcaggagtacctcgacatggctgatgtcttccaagaacgctttcgagatgcgggtgttccacacgtaccacgcatcgactggttcgatccggtagcggctgagcctggcgggtgagaaccactcctgcaacgtctcacgactcaccgtgggagcgtggtaggattgatgacgataggcctcgggaaggtcaatgccgcgaaatatcggtatacccccgaggtcattgttttgcccaggcccctcctcgcatacttgcggggcgtcattggctgccgtcatctcgtctcttcccggtacgtggctgtccatgttcacgggcaggtacggcaatgaggttcccgcacacaaacctctaccaagcatacgctggcaagccccgacgagacgacgcctccgcccgccacaccaacggtcaccgccacggccacggtgaccgtgaccgtggcaccgaaacccaagccaaagcccaaggccaagccaaaggtaaaacccaaaccgaagcccaaggcccattcatgatcgcagtgcccgatacaaggtggagcggcccacaccaagctgggccgccaccttcgttttcgggacaccctcggcaacgaggcggcgagcgcgggcaagctggccctcgctcaatgccggtttccggcctcgatagcggccctgcttcttcgccaccgcgatcccctcggcctgtcgttcatggatcaacgcccgctcgaactcggccaaggcacccagcagatgcaacatgagctggctcaccggatcagcggaccccggcccatagacctgcccttcaagggcaggcccgttatgctgtcagcagatctgccagttgtgggtgctggtgtcgtagcagacgccggtgtcggtgtcgtcggtgcggttggtggcccagccggtggtggagtcgtcgagggtgatgtggtggaggtcgggttgagtgttgagccagtgagtcccctcggcttggggtaggccatcgaggatggctagtaggtgggagatggtggctgtgcgggtgagcgtgaggatggttttggatgtgttggtggtgtcgatggtgaagccgtagttggcgagtgcagcggtcacatcggtgggctggtcggtgtagatgcggttggtgagtacggagcagttggggccttcgccgtagatgctgatctccacgctggtgccgtggtagtgggcttcgtaggtttcgtcgatcatccatgttgtggcccagtcggcgtcgacgagggtgtagggggttcgggtagtgggaagtccgatgtagggcttggtcaccatgttgacgtgtgcggtgtacttcatcgttgattcctttcccgatctctcgttctgcttataaatatatagcccgatagacggactgtcaagagtactagataaataatctaatacgcttgacttgaaggatagttgagagaataactcacatgtgagatgctatcagcggcgcagaatgccccctccgggccccttgctgcccctttgggtggccaaggctgtaaaccgcagcgatacaggcttacaggtgccccgaaggggcgcctatccacgcgctcacccgacgccgaaggcgtcggca

SEQ ID NO: 32 - DNA, 26620 bp, Propionibacterium acnes
ccttgtggacaccacgtcatccacatgacttgtgtcacatgattcccggaccatcatcaagcagatgctcacccaactgtaatgatttctgttctgaatctggacatgctctgacctgcattcaatgatcaattccgtgcgatattccacaacgcacggggaggtcgcagacaatgacaacagaaagcatccccacgcggctgctcgtgtggcacgagcagaccgatccgaccaagctcctcaggatcaccgacgcgatcaggaggggggatccccttccccccatcgaggccatggcgatcggccacagattcctcgtcctcgacggtgcgcaccgggcccaagcccaccagtactgccatcgatctgagatccgagcccgcctccacaacctccccctcagcgcggaaataccaggctggagccactccataccccgcgatgcagcagcgaaactggctcacctactcctccccgtggacgctctcggtcaggcggaaatcgtcctgcacggggtgcgccgtcaggtggggaccgcttcacaacgaccgcgcgacatctttctcgcctgccaccggatcgcgcgagttgcctacgcgcatggaatcagacctctcggcccggagttctccaacgctccgacgatcgacgccgccaccatgacctggcgcccgccgaacgtgggcacgttgtgggccatcgccagcagtctcggacccctgcccgcaactgtgacccggttcgccccgatcctccggcacgacgccatcggggattccgcgatgacacccgtcacctccgccgcgtgacgacccgcgccaattccgccccaccactggatgaggggcagccgcgtggacgatgctcctgttcaggcagggactccatacgagaccaataggaaaatcatgatcaaaaacacaagccctctgaccgtgaaaaatgtctcgaaaacattccgtggctccagcggagaagccatcaaggccgtgcaagacgtgtcattcaccgttgagcgtggtgaggttgtggcattcctcggcccgaacggcgccgggaagtccaccaccatcgacatggctctcggcctcacccgccccgacagcggccagatcgaggtcttcggtactgacccgctcagcgcggcccggtcgggacgctgcaccgcgatgacacagaccggcgggttgctgcccgacctcacgattgggcagaccatggagatcatctcctcgctctatcgtggctcccacatgaatgcctgcatggagcgagcaaggatcacgcatctggccgatcggcaggtgtcgatgtgctcgggaggcgagcgccaacgacttcgcttcgcactggctctgctgcccgatcctgacttcctcatcctcgacgagcccactgcggggatggatgtggaggcgcgccgggacttctgggcagagatccacgaggacacgcgtcgtggtcggacaattctgttcgcaacgcactacctcgacgaggtggacgagttcgccgatcgggtcatcctcatcaaggagggccgcgtcatcgccgacgacacctccgacgcgatccgcaccatgtcggggggttgcaccgttacggcgaccattcccgacttctccctggcacgactgaatctgccgggcacccaactcatcaagcagggcggcgcacgcgttgatctgcaccatcccgattccgatgccctcgcagcgcgagtcatccagctcggcggcaccgacctgcgcgtggtcccccgcagcctcgacgacgccttcctcgctctcacctcaaccaccaaggagtcctgacatgaccgcccaagcgcttcccgcagtcgccactcccaaggcccgccaccgatccgccatctcgctgaagtacttgtggtgcgagatgcgtcgccccttccggcgttcgacgatgctgttcaacctcgccctccccgcagttctgtacctggccctgttccgcaccgtccacaccgccgagctgccggacgggaacttcgcgatgtggatgatgatcggcatcgctgtctacggagcggccactgcgagcaccagctacgcagcctccatctccgtcgacgaggccaacgggtggacccgcaccatccgcctgacgccgttgtcgtcggtcgggtacgtgctggtgaaggtcctctgcgccatggccatcgccctggccccgaccctgctcatcggtctcatcgggctgttgaccggagctcacggcacgctgcgggtctgggtaatcggactgggggcggcttggctcagctcagcaatcttctccgccttcggcctggctctcggactgtccctgcgtcccgaggtcgtcatgcacgtccccggcctggtcatcaccggtctggcgttcctgggcaacgtcttcgtccccctcagcgggacgatgctcaccattggccgctggagccccgcctacggcatcaccgcgctggctcgttacccgctcaccaacggcatcgacatcgggggcggccacgactccctgacggctgccctcatcggcaccttctgctggttcgccggattcgtgttctgggcctcccgtcgatttaccaagagcacgggtcgtcagtgacagattcggccgatctccggaaggagcagtgttatgaccaagcccctcattgcagtggtcaccgcgggccaaggagcgcagaagcctcgcctgctcacgccatggctcaaggtccccggcgtcacggagaagcttgctgcatggtccgctcaggccgatgtggacctcgtcgagctcggtaccagggcgaatgcagaaaccttggcagcgaccgagaatgcgcagccactactggtctgtctcggagtcctcgtctcggatctcctggccgaccagaacattgtgctcgcaggacactccgtgggcgagctgacagcagcgtgtctcgccggggtagttgatcccgggacggccgtcactcttgcacgacggcgtggactggccatggcgcgggcctgcgctctccacccgaccaccatggcggccatcattggtgacaatccggatgacgtcctccggcggctctcggaactgggactcacggctgccaacatcaacggaggcggacagattgttgcggccggctccaccgacgcgatcgcggaactggtggcgacccctcccaacgggaccgcagtcaagccgttgcgagttgctggcgcctttcacaccaagtacatgacgcctgcgcaggacgctttcgcccaagctgctcaagacgtcaccttctccgacccgcagcacccgatcatctccaacctcgacgggcaggagatccggtccggcaatgacctgcgtgaacggctgattgcccaggtgaccgcgccagttcgatgggatctctgcatccagcagatcgcggatcgtcagccggaactcgccctatcggcccctccggggaaggtgcaggcgtcgctcttgtctcggcagatcccggacctcgcgacggtctgcatcaccacaccacgggaggcagcccaggctgcacagcggatcgaccagtccgtatccgtccttcagggggcatgatgctcatccccgagtacttcctcacagcctgttcggaccatgctgagcgcctggcgatcatcacccacaatgacgttgtgacgtgggccgaactggcgactcgcgtcgacggttttcggcgctggctgcgggaccatggcgtgcaccgccaggacagggtcgttctccagacgccaagcaccgtaggcacggtagccctcatgtgggcctgcctgctcgacggcgtgacgatggtcccggtgcaccaggacctcactgcctcccaggtgcagcaagtcatcgacgactgccgtccagctctggtgtgtggcagcccggacctcgtccaactcctcaactcccccggaatgaagacaagcacacctccaacgcggccggagtcaacgagtattctgccgtccttgtcccgggtcagccccgatgaccttgcgatgctcatctatacgtccggcacgacgggtctcccgaaggggatcatgtgtccccaccggcaggtcgccaccgccgcacggatcgtccatgactgtctcgggtaccgcacggacgacgtcattctctgtcgcctgccgttgtccttcgactacgggctctatcagattctgatgtctgccatctccggtagcgcggttgtcctgcgggacggaggcgcgcaggaccgcaacctggtgcgcgacatcgcccgtcacggcgtcactgtcgttccagtcgtgccgtccatggcgtcaatgctcatcaccctgcagcgtcgtgatcagttgccgaccatcgtcagactgttcacgaataccggggcgcgtctggcacccgagaccgcgaaccagttgctcgcaagcttccccggctcccgctatgcgtcgatgtatggcatgacggagtgcaagcgcatctccatccttccggtggaggagtacgagacgcatccggacagcgtgggaagagctctgcccagcactcacgtcgagatcgttgacgctcagggagttccggttccggcgggcgagcacggggagatcacggtgtccggcccgaccgtgatgaacggctactggcaggtgccgaacagtcccagtggacgattccgacccagcggccacggcctcactctgttcaccggtgatcgcggctggatggatgaggagggacgtctctacctcctcgggcgcgacgacgagatcgtcaagcatcacggcatccgaatcagcctgcaggagatcgagatagccgccgaagccgcgccgggcgtcgacgcagtcatcgctctcaagccggcctccgactcggcccccattgaaatcgcctactgcggcagcacgagtcccgagaacctggcccgccatctcgaaaccgtcctggaccgggcgcgacgaccccaattcatccaccaactccagcagatccccctgacccgtaacgggaaaccaaaccggtcagcagccgccgaggccatccgctcaagggcgtgacggcgaaggccaacacccacagacgaaaggaaaccaccatgacccaggccgagttcaaccagttcatcgagtccacctgctccgcgacgatcgtggatcccgaccgtcctttggtcgatcagggcatcgactccctcggaatgctcaccctcatggtcgctatcgaggacagcctcggcatcgaactggatcccgagtccctcgccgacggtaggggttccacgccctccggtcttctgtcccttgtcgagcagccgaaagcgacggtgtgacgacatgacgacgatggttccttgccgccgtgtggagatgccgcaactgttcgaccacatccccggaagcatctctctctcaggagggctgcccgatctgagcgtgctcccgagcaatcagatcgccgaactgacgtcccggatcatgcgtctcggctcaagaatcctcctgcaatactccaccccttcggtctcgtcctccttggtgccggccatcctggacctggcggaacgaacatgcatgtcaccggatccgcggaatctgatcccgaccgcgggttcccaactgggcctggccatggtgatcaatgcctttgacggcgatgagatcatctgtgactgcgccacctatcccggggcgctggccgccttcgcctctgccggcgtggaaacaacgggggtggccagtgacgaggaggggctcaacccagacgcgctcgctcacgccgtcgcagagggtcgggccaatggccgccgcatcgcagccgtctacaccacgcccaccttccagaatcccaccggctccgtacagtccgagaaccgccgtgcggccctgctcaaggtgtgtgctgacaatgacctcctcctcatcgaggacgatccgtacggcatgctgtccttcgacgggcagacgtggccagctctgaagtccatggacccacagcgcgtcatctacctgggcaccttctcgaaggtgttcgcaccgggcgtccgttccggctggatcgatccgcccgccaatcttgtcgagaaactccgcgctgtgtgcgagatcatgacactctcgccatcagccctcaaccaagcgatcatcggcgagtaccaccgtcgtcacggatgggacgaactgttggagggctatcgcgcctcctaccgcgaccgagcccgtctcctcatcggggctctcgaggctgaactggcaagaacgaattgcactggcacgtggacctggcgtgaaccacggggcggcttctacctgtggttggagaacgtcgccagcaccagcggtatcgacgttgcgcgtcgcgccgccgacaacggagtggccgtggtgcccgggaaacacttcgacgcagccggacacgattcgccgagcctgcgggtgtcgttcagcaattcacgcccggctgatctggtcgaaggagctcgtcgtctcgcccgtgcactggtgggagaggacgttcagaaatgactctcgcgacacgcaccgccaccgacaccctgcagcagaccttgccctggggcacccacgaacgtctcgtcttcgggcgggcgctcctgcgcagcaccggcttcccagccgaaggcttggccctgctcgactccgacgacatcctccccctcctcgactcctttcttgccggggacatcgacagaactcacttcgagaaggaatacaccagtcgcgaggagtccggcgcaagggcgctcatcaacgtcttgaaggacgatgcagtatcgcgcgccatcgcatggcagaaccccaccgcgtggaggtccttcgaatccctgtcgtccacgagcggaatcaatgcttcgactcggcgcaaggtacgccaactcgccctctactggcaacgttactgttccaaggctgagaccattggatacttcggcccgttcgcctgggccgaagtcgacccggaggcctctgcggtcgaattcatctcctccgaccatctgatcgaccgttcccacgtcgcaatggaggcgtgggcggtcattgagatcgggaaagccctggcatcacgggccgaccttcagtggtggatgccaccaatcctgtcccccgccgtcgacctcaacatggagagaggcaccgtgacggtggctggacaccagccacgacgggtccgggaggacgaggcacgagttctcttcctgaccgacggcacccgtcccgccgcccagatcgccaagagcctcgacatggagcccgagcggttgcgcaggatcctcgtggcccatgaacgtcgtcacaccgtgatctgggacgccaacatccctgtctcagtgcacgcgtgggacatcctgcacgaacgcattgcccagatcggagacgctgggctgcgagatgaggccactgctgttctcacgaggttcgacgagcttctggaggtcatccgcaacattcccgacgcccggtccctgacggaggcgacggaatccctgtcccgtcttttcgaaaccgtgacaggaacctcttcgaacagacgtgcgggccaggcatatgcagcccgcagcctgtgctacctggactgcacccgcgccggaaccgccaaggttgggacccggcttctcgaagccctcgacgcccccctcaacctcgtcctacaatccgctgactggttcgcggcgaccttggcaaaggaatacaccaccgaaatcacggacctcgcaaatcgaaagcagcgggcctcccaccagccactgaccatggctgatgtctggccgtccacgatgtcgctgttctggggggactcaccgtccccactgcagcgagccgtgaccgaactgtcacggcggtggagcagagtcctcgaggggctgcagccagtcgacggtcgcatcgacacgacatcgtccgctctctcgggcgccgtggacgagcagttccccgtgtgcaccccgattccagaactgtcagtgcacagcccggacctccaggtcatcacctcgagcactagcaacatcgcctccggacgagtcactgcagtcatgggtgagctacatgcctgtctgagcagtctcgacatgccgttgctcgagtggtcgctgccccatggttccattcgcgatcgcatcaacaccgcgctcaacctgcgacgtctggttcccttgttccccgagacatggaggcgcaacaccggccgcatggttccagcgacggtcggagtgggggatcgcgcaatcgggttcactcggacggccgatcaagaccgtgcgaacacatggtcgatgtcggcactgctgttcgagcagaccgaggacggactcatgatccgtgatcccgatggcaggctctggaccatcgcacaagcgtggagcgtgcccatctccatggtcgccgccgatgcgttcaagatcgggctgcccggctcaccagcccctcggctcaccattgacaatctcgtcgtgttccgtcgtacctggaggtttcccgctggctccatcgacatcatgcacggttcagccgccgagaaacacgctcggctgagggagtggcaggtcacgaatcaccttcctgaccacctcttcgtcaagttcccctccgaacccaagccgatctacttctccttcgagtcccccgccatggccacggtcttcacgcgatcactgcagcgcgacgcccgagagaatccagacagtctcgtgacgatgtccgaagcactgcccgagcctcaatcctcatggctgcacgacacccggagccaccactacgtccacgaattccggctgcaactgaccaaggagcgacatgacgaccacagttgagacacatcccgaaacacgtggcacaaccgcgacatccatctccaatctgatcggtcacacccctctcgtaagaatggaccatctgttcgacggcctccccttcgaggtgtacggcaagctcgagaagctcaatcctggcggaagcatcaaggatcgagcagcacaatccatgatcgaacgggcaattcgacggggtgagatcgtcccgggccgtacgaccgtcatcgagtccagttcgggaaatctcggcatcgccgtggcgatactgtgccaggagcacggcctgaatttcatctgcgtaaccgatgccaaggccacgccaacgaacattcgactcatcgaagcgttcggggccactgttgaggtgatcgaagaacctcatcccgagagtggcgaattcctccccatgaggctcaagagggtaagagaactgctgtcagagattccagatgcatggtggccgaatcagtacgggaaccccgacaatccggcggctcacgagcggactgtccgcgagatcatcgaggcaatcccgcgggttgacacgattgtctgcgcgaccggctcgtgcggaacccttcgcggctgccacgaagcattgcgaaagctgtccccacgcacccgactcgtcgccgtggacgccaagggcagcgccatcttcgacgaggcaggagcaccccatccccgctgtgtcccgggacacggtgcgtcagtgcgaccgccgctgtggcgcgcggggctcgccgaccaactggttctggtctccgacgcggactgcgtcgtgggatgccaggaggccctgcgcaccgaggctcttctcctcggcggatcctcgggagcaattctgacggccattcaccgagtgtctcccacgattcccgctggttccaccgtggtgacgatcctccccgacggcggcgagcgctacatcgacaccatctacagccgctcgtgggtcgactcacacatccccgggctgccctctctcgccgactggggggctcccaaccccgccaattcgtatgacctgaacagaagtgcctcatgaagctctacaccagagagaccgtcgaaactgcgcttgtcgggcgtcatggccaggttctcagtgccgtacagagtgcatacatgctgcattcgacgggagagacatcgctgccattctcaaccttcctccgcccggccgggtatccgaacgatcggatcatcgcacttcccgcccacatcggaggcgacttcgacatagccggtatcaagtggatctcatccttcccggaaaacctcgaccggggccagcaacgagcttcctccgtactcatcctcaatagtctggagacgggatacccgaccgccctgctggagtccagtcagatttcagcaacgcgaacggcagcatcagccgccctggccagcgccaccctccatggctccgaagaccatgtcagcacgattggcatcatcggctgcggaacaatcaatcttgcaacgatcgactacctcttccacgtgcacccccagatcaacgaggtcctctccttcgatctgaggcgggagcgggcccatgagttctcgcacctcgtcaaggcttcgcacccagaggcccgggtccgtgtcgccaaggagcccgacgagattctggccgcaagcaacaccatcgcgatcgccacgaccgactcgagtcattggttggaccttccgccgtggcacgggccggggcaccaagtcgtcctgcacacgtcgctgcgagacctgtcagtgccctcgatcctggcagcggccaacgtcgttgacgatcctgatcacgtctgccgtgaagcgacgtccttggatctggcaactcagcagaccggcaaccgggacttcatcacggggagaatcggagacctccttcttggcgcgccgctgtcctcaagtcctgactcccgtgtcattttctcacccttcgggctcggcatcctcgacctcgcagtcgcctccgtcgtcattgctgccgcctcctcttcagcagtcgagatcaatgggttcgaccccgggaaacacgccacaagcatgattgaggtgaatcgatgaccaccacacagatcaacgacaacacggccgttctgcgcgacgtattccccgccggctccgtcgcattcgtgagcggtgcctcacgcggaattggcgctgcctgcgcgacagcccttgcggccgcgggatgcaacctcgccatcacttatcgaaggaaggagaacgaggcggcacaaatcgccgaatccattgaagccatcgggcgccagtgcatcacaatgcagatggacgtaaccgatgagaaccaagtgaccagagccttccgcatcattcgccagcattacggacgcctggacgccgcggtcttgaactcgggaatcaccagtgacgggcatcttgcaacaatgagccgctccaagtggagctcggtgatcgacacgaatctgaccggaaccttcctctgcacgcgcgaggcgaccaaggccatgtactcgtccggtggctcgatcgtcatggtcgcgtccaccagtggagttgcagggcgaccgggccaggccaactacgcagccagcaagggcggaatcgttgccatgatgaagacgctggccccggaggttgcggcaaagaacgtccgggtgaatgcggtggcacccggcttcattcagaccgacatggtggcggccgttccaaaagcggcactcgcccaggcaatccaacacatccccatgggccgtcttggcctggcacaggaggttgcgtcagccgttaccttcctggcctccccgctcgccgcctacatcacagggaagaccctcactatcgatggcggaatgatcaacggctgaccccaggacccgcacacccccagtaccgagaaagaaacaacaatgaccgagatcacccacactgccaacagcatccgaacccgcgccgaggaacgttccaacaaagcttggcgcctgaaggaggagatcatctccaagctcggtctcgagaccaagccagaatatgtctcggacaaccaaccgctcttcggacgtggccttgagatggattcccttgacactctcgaagtcgtcgtcgccgtcaacaatgagttcggagtctcggtcaacgacgacgacgtacaggcgttcggctcgatcaatgccatggtcgatttcatcgaggtgaacgagaagtgagttctcttgcgctcgaggcgccacccaaggacgcccgtaagaaattcgcctacgacagcgatgccatcaagacgatgctcccacatcgttggccgatgctcatgattgatcgcgcctacgacgtcgtcccagggaaatcgggcaaaggcatcaagtcggtcagcgtcaatgagccgttcttcgccggtcactaccctgaccattccatcatgcccggcgtcatgatcgtcgagtcgatggctcaactcgtggccgtcatctacgtagccgaggccattcagaacaatcccggcatgacgtcgcacgacgcacgttcaagcgttggttatctcggcgcgatccgtcagatgaagttccgacgcctcgtcactccgggcgaccaactcaccctccacgcccagctcggcgagaaagtgggggctctgcgcgaggtttccgtgagagcactcaatggccgggatgtcgtcgcccagggggaactcgtcgtcaccgagcggtgacacccagccacacacgagaaggaagtcccatgatcgttcgcccctacaggccacgtgatgcggaagcgatcgtacatctctacaacagccattccgactcccccaatccagtgtcgggagggattgttgaggaggagttccagagggagctcgaagaacgtggttcgacagtgttcctagtggccgaggaggccggatccattgtcggcacattcgggatgttccgcacgaatggccgacacaccatggccgatgatgaagtcttcgccgacatgttctatgtcaccccgtcacatcgactctcgacagttccgggacagctaatcactgaagccatcagcgagtgcttcatccagggcatcaacgtgatccgcctcaccgtgaaccccgcgaacatctccgcgctcaaggtttacagaaaagtcggttgtgcctgtctcggggccaccgatgcaggcgaggacgggaacattgagctgtacaacttcatccctctggttcttagggcaaccatcaccaaactcgaccacgattgtattcgagccctggcggacatgacttcgttcgcctgcatcaccgagggacgtccacttgatctgtcccacgacttcatcgtggacgctggacggaagatcgtctcccacagcatccagatcgggcgttcaaccatccacgccatggtcgacacgggctcgaggaccattgtggaggccaccctcgacaaccgcgactgggatgctcctcgccagatcgtcgcccccaccccctgtcagaaccggcccgaggaacagcgaggcaaccctgtccggctggtgcacaagaagcttgaggtcaccttcaacgaaggagtcattgagatcagtacgactggccactggggcccggtcctcgcaatgtcctggccctcctccgtctcgcaccgcgctcacgggtggcgacagggccccgccaagtcgtatcgatgcgagcttctcgagaattgcctcgtcctggatgacgaaggaggagtgaaatgcaccatcagcctcaatgattgccaagtcgcgatccggatggatggtgccccaaaaacggaattgagaatgtaccagtggtgcagcctgcgccagggctatctgacggctgacaccggcatcacgagcttcaaccgggcatccagtgggctcggagtcgccgtccgggactcgtccgagattgtcgccgcgggccttcccgtcatccctgacacaccgatcacatggagtgagggtgacatcacggttcagctcgatccctgcggccgcgcctccctgatccactcgaccctggtggaccgaagaatccacttggacgagtctggctcggcaagtctcaccatgaccgtgtttggtgattcccagccccatcgtgccgacaccgtcgagctgcctcccctcgcggcaggcaccgacaggatcgtcctcaagccggctgccggaggcgtgaccacatggcgcttgggcgccaccaaggtgctcaagtcaccgtggccacacgcccgcgcgctcgggcccaatccgatctggcgagccggcctgtgggtcagtcacgagccggatcgccacgaccgtcgccaaggaatggggtggggtcccgatcatcgcagttggaccctgtcggaagacaccatgaccagtactgacgggacactctcctggcgcttcagcggctcccccgacaccggctggacggtcgacgtcacgacgagcaacacgcacggggagaccgtcgtctggctcaccccggactgcccggcgggcgagaggatccgcacgtctgatcatgccgtgacgaccatgcttgacatctcgaagccatggcagcgctggaccacccgatgcgcaattcctctcagacacgggaagtggttcctcatcgagcctgatcatgacctcactgattcccccgaaatcctcatgcgctctgttcacggggtcctgctcgtcggctgtgtcggacgagcccactccggatccgcttcctggcgctttgccatcacgtcagaactccccacctccaacccaagaagaaacgactacacctcagccgcctgaacccaaccagttggaacacccactacagaagaaatggagcaccaccatgtccatcactgagcagtacaagacccttcgcacctcggtcggcctccacacgcctaccggtcccctggtccgtatcaccggtgatgatcgtctcgagtttctcgacaccttcctgtcccgcgcctcggacttcgtggaccccgacaccactcgggagtgcctcgctctcaccgaggacggccttccgctgacgatcttcctccacatcgagcgcgaggaggagtcatggctccttccccgcaccgccatcgatgcggcgaccctcgccacgtacctcggcaacctcgagaccgatggtgacctgtcaatcgagattgctccagagggttggggagctgtcgctgtcgaggggccgctgtcgtggcagatcgccgaaaaccttctcgacttcgacgtggctggcctcgttcttcacgccgtcacggacgtcgtcgttcccggggcccccgagggatcgaaggcatggctcgcccgggtcggaaccactggagagtacggctacctgctcgtctccaacgttcccgacctcgcccgcacttatctcctcagccgcgccacggagctgggcggtcaggcagtcgacgccgatgctctcgcacgagtccaggccgaggccgggatgccctattacgcgatgggcgtgtgccacctcgatgtcgccgggggtgacctcgcctggctcgtggactggcagcgcatcggcgagttccaaggatccgagaatctgcccacacccgtccgagaccagcgccgactggccgccatcgccctgcccaccggcaaccgcccggaagctggtcagaccgtcgctgccggggatgaggagattggaatggtggtgtacgtcaccccgtccgccaatcccgatgaggaactcgcgttcgcacttctggatgctcctttctggactcccacccttccgttgaccgtcggtgcccacgacgggaccacggtcaccctgccccgcgtcgtggcagcctccagcctcaacaagatggggtgacagcgatgacgatcactgctgagaacgccaccacccgcagcgacattgcccggagcattgcggtgaccggcgtgggactggtcacggcacagggtgaccataccgacgagtgctggaccgaacttgtcgatggggtttgcggaatcaccatgaacgtcacgttcgatgactctggcaccacgattccgtgtgctggcgtggctcccattccgaactctgattcgatcgaccgctgttacctgctcggcgtccatgccatgcgtgaagctctcgagatgagtggcatcgacctggactccgtgggtcgtgatcgcatcggactcgtggtgggctcaagcctcggcgcgatgcccaccttggaggcggctcatcgccgggccattgagaccggcgtgctcgatgccggattggcggcagactcccagctccactgcgtcgccgaccacctcgccgctgagttcgacatccgtggaccccgcgtcgtgacatcgaatgcgtgtgccgctggtgccgtggcgatcggctacgccgcagaactcctctggtccgacgatgtggacctggtcgtctgtggcggtgtcgatccactggcccagatctctgccaatgggttcacgtgcctgggagctctcgacaatctcccatgcagcccgatggccggttcctccggtctgactctgggcgagggagccgggttcatggtcctcgagagaacagatgcggcggctgccagaggccaggaggtgatggccgaaatcgccggctacggcacaagttgtgatggttaccaccagactgccccggacccgggtggcaatggcgcccgcagctcaatggaggccgccctgcgctcagctcatctcaagccgtccgacgtcagctacgtcaatctccacggcaccggtactccgaccaacgacgccgtcgagccgaaggcactccggtcattgttcaagtccgatgaccttccccctgtcagttcggtgaagggcgccatcggtcacactctcggcgctgctggcgccatcgaggccgtgtgctcgatcaaggccatccacgagggggtcctgccgccaaccgtcaacaaccgcgggcaggcttcccgaactggtctcgacatcgtgccggagtgcgcacgcaaggccgctcccgacgtggtcatctccaactccttcgccttcgggggcaacaacgcatcagtggtcatcaccgcacctcgaggaggcgttcactgtaccgccccggcgcagcttcgcgaggtcggaatctcaggaatggcagctctggcgggaaaggccgccaactcggaggagcttctttcggccctgtcagaagattgtccaatctggatggccgatgagaagacctgggaaggggatgctgtccaaaccggccatgtggacatcaagcgcctgtcccgcacaatcaacccgtccaaggttcgtcggatggaccccttgggaatcatctccagcgcggtggtgactgatctgtatgcccgacacgggaagctgagccgcaaggatgccgaaagcacgggaatcatcttcgcaaccggctacggtcctgtgacggcggtgacgcagttcaatgacgggatcatccgccacggttccgagggtgccaacgccctggtgttcccgaacaccgtggtcaacgcagccgcaggccacctcgcgatgctgaatcgctaccgtggttacacggccaccttggcatgcggtggaaccagttcactcatggcgctgcttctcgctgctcgcgtcgttggccgcggcgctgcggatcgcatcatggtcgttatcgctgacgagtttcccagcattgccgtccaggccgtcgcgaagcttcctggctaccgacacagggttgatggttccggagccgtgctctcggaaggcgcggtatgcgtcctggtggaggccgtcgaagtcgccgaagcacgcggtaccgcccccatggcgctgctacgcggcttcggatcccgtggagagtccgtgggagtcggtcacaccgcatccgatggacgggcttgggccaaggccatggccgctgcactgggcccggccggcctgactgcctccgacgtgtcgaccgtcgtggcggcatcaagcggacatcctcgcgtcgaccgagccgagcaggcggccaggcggatcgtcggactgtccgcaaccgctacgaccttcccaaaggcgattgtcggagaaacacacggatcggctgccgggatcgggctgttcggtgccctgtgcggttcgaggtcagccgcgcaccagaacatccttgtcaacgccttttcccacggcggtggttatgcctcgatggtggtggagtcactgtgaccacgacgcttctgccacgggttgcccagccgggaccgggcgtcagccatgtcgacaccgaccgtcccatcgagtgcatcatcacccaccacccccacatgccgcgtgatcgcggaggccacgccacctccgtgtcaggcaggtacttgctgcgccaagccgcagaactcatgctcggcacggatcctgcgcattgccccgtcgtcgacccttcgcggcgctggtactggcccggaatcaatcttcacggttctgtctcccatgtcccgggctggagcctgacgacgctgagcaccggcggccacatcggggcagacatccaggacttccgggagcgtcccggcgcaatggcattcatcggtgacctggtcaagctgtcgcgatcggcgtcactccgagaattcgcggagtgcgaggccgtcgtcaaggtgtccgaattgactaaggagacgttcgggcacgtgcgactgcccgaatggacacccggatggcgccacgttttcgaggactactgggtctggagtctcgagatgcacgggatgggagtcatcgcactcgcatccgatctcccccgagccattcgctggtggcggtgcgacgccgatgcccgtggccgtctccaggctctccgacccataagcagtcttggaccaggaaggccgtcatgagccggtactcacgtcgaatctcaggcatcgaacgcggctatctcaacgccgcaacccggggcccgcaccccaccatccacacgatgatcgacttcgagggccgcgtccccgccgactgttggcggcacgcatccacgattgcgtcggccgccaaccctggcatgacagtggtccggaggtcgggccgatggacatccgatccagcgggctgtccggttgtgttccacgactggaccgcggaccccaacgacgttgccgacttccacgctgacatggatctcgtgacgggaccatcgtccacgctccacgttttcgagggggcggaacgcacccgaatcaccttggcagcaagccatgccgtgaccgatgggcggggcatcgaacgatttctcgtcgacctgcttgcagcgttggacgagcgtgaacccattggaagccccgacaccctgaccgatgtcgatatcaaacgatccttggagaacagcatcaagccccgacgccacctggccgctgtgcccgccgatgtcctttctccactgggggggaggaagaaccaacgtatatgggcctccaggacgtggcacagtgccccgggagccatgagcggaagaatcgctgccgctgtggccgagatgatcgaccacgccgcaatgatcatcatcccggttgacatccggcggcacgtcccagaggtccgatccacagcaaacctaagtgcccaactgccagtgatcatcaccccgaaccagcgctggcaaagcatccatgggcatctgctcacggaccttgctcgccatcgagaccttgcgatcatcagtgaggatttccgccacaacaatccgttcgcatcgaccttggaggaaagccaggccatcggcctcgatggtgtctatccctgtgccgcaatcatctccgaccacgggaagctcgacctttcaaggttccagaccttggaactcaccccggtctcgatgcgaagcctcccgatgctcgttccctactccgcaatgttcatcagcagttgcaccgtcggcgagaccaccactgtcaccatcgctcatcgcgctgatgacgatcccgattccataaacaccttcttccaccacatcgaatcccagatgtccatctgagccacgtcgtccctggagagcaaacatgaccacccaaaatgtcatcaccccgccgcgccccgtcacctcccatgccacggcgaccaggtccgaggctccaccgcgaagcgtcatcagagccatggccatctcgatggtcgcgaccctcatggtcatgctcgacacgaccgtcgtgaacgtgtccttgagcgcgaccaccgcccgcttcgggagcatgggcagcgtgcagtgggtcctcacaagttacctacttgcactgtgcgcgacgatgacggcctccgcctgggtcatcgaccgccttggtccacggctcaccttcatcgcctcaatgaccatgttcctcatcggctcggtgatgtgtgcactgagcgattcagtgtggcaactcgtcactggcaggaccatctccggtgccggagctgggatccttgttccgacagcatccgtcctgcttatccgtggcatcccacgcgaacaacttggcagggtgcaggcactgaatgggagtgtccagttgatcgctcccctgatcggcccgactgtgggcggtctcctcgttgacaggtgcgggggctggccggccatctactgggcgaacgtccccgtagctcttgttcttctgattgaggccgtccgcgtcgatccggacgaaccacacaccgctaagcgccgcctcgatgctctcggcctggtctgtggcagcaccgcgatcgtgctgacagtgcttggtgtctcactcttcggcaggacgtcgcgaaacaccaccttcctgcttacgatcggcgcgcttgcagtcctcgcatgggcgttcttcatcacccacatccgaagggctaccaaccctctgcttgacgtttccctgtatcagaaccctgtctattcatggtccagcttcaacgtagcggtgcttggtttcggtctctacgcccccatggtcgtcatgcccctctatctcgaggcgacgcgccacctcactgccgtccacactggtctggtgatgtcagtggccggcgtcggcgtcattatggccggaatcctgtgcacgaagatcatgggccggatcggtggaggcctcacgatgacagttggcataactctgagcatcatcgccactctgcccctggtccggctgacgaaccacacctcctacatactcctggcagtctgcttggccttgcgtggagcaggaatcagcctgacaatcgtcccagccatgacacgggccttcgagtccatcaagaggacggccatggcggacgcctctgcacagctcaacctgttgcagcgaatcggcgggacaattgcgacagcagtcatcatcgcagttatccaccacgaggccatgctcacccgcggactctcccccacagtgttctcgcacgccaacgtgtggatcctcaccgcgaccgccgtcacccttctgccggccttcgcgcttgcgaaggccgaaagacaacagcaggatctctgagcaccgaggagtactccctcgtagaccctcctctgatctaattgggttcgttccaagtgtgtatctcactccggggagccccgattgctgaaccacatcccgttcaccctggcgagtccctcgtggtacgacgtcccctgggcgcccggatctccgtatctcacaggagatatctcggtcctgccagcggactcgccaaggtggacgacgaccatccggggtccttggcaaatccacatgccacctcgtccgacccttccagaggtggggtggaaagtgcatgtgtctgccaagccatcggaattggaatcggttgcctcagtcgtagcactgtggtgcgtacgccacagcgtccccttcaaagtacttcgcacccgaggtctcgttcacgcgagtcaagtcaagtatgcggaccgaagtcagagcggcaaggtctgcacctgctaccccgacggcgagagccttgagcacttctgctccggtcttgccgagctgcttcagaacgtcgattcacctccggtgtccggcgagctgcgagtcggatcctcccctctgtggttgcgtcacgggagtttccgagaggcatgggcggtgtcatccacaggagtaccgttcccggtctacccgggaacaacacatcctgatcgtcgaggccccgcgcccgcagaatccgatcacgacacgccgtggatccggaggctccgtcggacgaatcgccccagcacggttcttcccatcgacgatgtcagactcctccaccgatcaaatgctggcggcgtgtatcaggcaacatggagagacggcacatcggtagtcgtcaaggaggcccggcacctgtccggacttgatgcggcgggtgtcgacgcccgagtgcggctgcgtcacgagtacgaggccctgagaagactggacccctatcgggccgctccccatcccattgatctcattgagaccgaggacggctcgttcctgatcatggaattccttgacggaatgacagtccaccaggagatgtcgaggttccatcctctgattagtaggcgacctcatcggctatcgatgaccgatttttcacgctggtgccgagaggtcgaagatcgcttgaggaatgtcacgagggtcatggccgggtgcggaatcgttcacggggatcttcatcccgcgaatctgatacatgtcggccatgaggttttggttactgactttgaatcctgctcaatcgacggggtcgccgtctcgtcagggatcgccgctccctggttccagtcggacgacacgattcccgatccggcgacgactgacgatctccacactcttctcgtggatccgacttgcggccccgcgcttgtcccccatccaaatcttcgcgcgctcatcagccaggccgcagtcgaggacatgatgggaaatccgactggtttaccacatgcctggaacctcgaggacatgacaagcgaactcgccaaggggatccgggcatcagccactcccgcacgagccgaccgcctctttccctcagacccctacctgttcgggcatccaggttcagaattcggcctgatgcatggcgccgccggaatcatggctgctcttgccgtgactgggtacggtgttgacgcgaatcacgtgacctggatgaaggaccgcttggccacccgcccgaccctgctgccggggttggccaacggaatcgagggaattgccctgggtctctccctgtgcggtcagaacgacatggctgcatccctgctccaccagtccggaattctcacgatcacaacgaacggatcgactgacctcaccctcggtactggtatggcgggccgagcgtgcgcgctgcagtccctctcacaacgactgtcatcgaaatctctcgcccacgctgcatataccctctgggaacaactcgccgtggctgtgcggaacactgatgtggccttgccgaacggcctgttctccggttgggagggaatcgggctctccctgcttgcctctcccctgccggatcgtcatgatctcgcccgccactcactccgactggccctggccacgacaacgattgttgacggtgcgctcttctcaggcgagggacagatccgatggccatatctggggcgtggtcccgcggcatgtggcccgctcgccgccaggcttgatgatgaccagacggccaaggccgtggcacagacctgtcgttgtcccctgactgagtcatccggtctccacaatggccgcgcaggtctcctactcgtcctccgccagctcgtgggagaccaagacgacgccgttcgccgccacctcatgagactgtcgtggtcgatggaccgtcgcgaggaaggcacattgctgctgggtgatcatggcctgcgtttctcatccgatctcgcgacggggtcagccggcgccctcctcgccctgagcagggacccatggcggaacatgacacgaatgctcggaatatgcgatgacacctgtcatggcccactagtgacagtttgatctagcgccgatagttcacaactgaaagactccaaacatcgaggaaaacatgctgagccaaaacgccttggcaggcgtggctcgtttcaccacgatgaacaccaggagacagaatgtccgttgaggccatgcaatccatcgagatggacgaggaaaacagcgccagccagacagtttgcgcttgttacagcttcttctcgtggtcaggatgctgcgtagtctcccaagcggtggaagcatcttgatcgtgtgagacgccgtcgactaccctgtcccccgtggtacgcacacgccccgtcctggacagtcccggaagaccgctcatcgcctccggagtcgtcctggcggtcctgctcatcatcgcggtgatgacgatggtgcttcagcgcgaccccactctcacccccggacgccgcattctcggtatcgtcctgtccacggtccaggccgtcggattcatgtggctgcagacccgcatggttcgtcacggcaagggttcgcgcaacatgcgtgcgacccttggaagggtcggtttctgggccacgtggggactcgtcgcagtgggagtcgtcaatctgtggctgaccaactcgtggaccctcttcggggcctccgtcgccacgcccctccttctcctgccaggggtgtggagtgtggtggccaccctcgtgaccctgatcgtcggtttctccgacctcgtggtcacccacacctcgccactgacctcagccacggtcgtgctggtgaccatcgcggtgtcggtgaacctctacgcattcacgaagctgtcgacggcactcgttgaactccgctcctcccaggaggagatcgcccggctgcgcgtggacgccgagcgtcaccggatatcgcgggacctccacgacatcatcggtcgcaccctggtcgccacgtcgatgcgccagcaggcggccctccacctcgtcgaccgcgacccgcaacgggccaaggaacagctcgacgccgcccatgacgcaatcaccgaggggcagcaccagttgcgttccatcatccaggccgagatgagcaccagcctccccgacgagatcagcgacgccacattcctgtgcgaccgactccacatcgacttccgcatggatgaccgcggcagaccgcacaaacccttcgactcggcggcggcggcggccctgcgcgagggaatcacgaacatgctcaagcacagcgcggcgggctactgccacgtcgccatctccccggacctcctgaccgtcaccaacgacggttgtccgcaatcacctcgcccctccaccacaccgggcaccggaatcgaccatctccggtcccagatcgaggcgctcggtgggtcggtgacgacgtcgcggccctcgcggggcaccttccggctccgctgctccttcccgacccggggggcgtccacgaccacacccgcgaccgaaggaggacgatgacgacgagaatcctcctcgccgaggacatcaaactggtggcagaggccttcgaggcactgctctcggtggaaccggagttcgaggtcgtcgcacgggtggcacgcggcgacgacctggtcacatccgccacccgcctgttccccgacgtgatcctggccgacatcgacatgcccgggatgaccggcatcgaggccacccgaatgcttcgcgacaagggataccgcggcagaatcatcctgctcaccgccctgccgggaagcgggcacctgcacgccgcgatggctgccggagccgacgggtacctgctcaagtcgatcaccgcgccctccctcatcaacgccatccgggcggtgtgcaacggccagtcggccatcgacccgaacgtcgccgcggtcgccatgcgcaagggaccctcgcccctcaacgaccgggaaaccgagattctgcgcctagtcgccgacggttcctccaccgcgcagatcgcctcgcggctgtacctcagcaagggcaccgtcaggaactacctgtcgacggcgatgtcgaagctcgacgccgactcacgcacagcggcggtcacgcgggcacgcgaggagggctggctgtagcaggcgacccgctcagcccaccgcccctcagcccgccgactcctgacgcacggcctcctcgaccgcccggctgagcagggacccggccctgaccatcgacgtctccgggtccggctcgagatcggacaacgcgatgatccggtcgaacgcggaccgtttctcctcgggcaggtcacagcgtccgcacaccgcccagacgggcaccccggcgtcccgggcgatcttgcggatggtgtcgggaagcttgccgagcagggtctgctggtccagccgcccctcccccgtgacgacgagactggaggcggagatccgcgacaccgcgcgggaccatcccaggacgaccgccgcgcccgggcggtacctggtccccaggcacatcagcgcccagccgacccggctgggcggctgcgaaccccctggccaccgcccggcaggcctttcccgaactcagcgaccccttgaaggagtcgacggcaacgatgaccggcgcattcggatcaggacgcatgggatcagcatgtcacgtcgatacggagcagtcgcgccgcctacccctagactcgggggcatggtcaaccgagtctacctgtccctgagcgttctcgccctcgtgctgtgggtggtcgcctaccgtcacatgccgggctgggccgcgggcatcaccctggtgggcatcgtcgtgctgtcgctgtggtgcgagtggtcgcgggtgcgcaccctggccaggatcggcaagtcccgccagcagggcccccgctcctcccgaggacgcaacctgtcgtgagcaatacgattcccgcagccctccaccccggccctgacgaggcc

SEQ ID NO: 33 - DNA, 29140 bp, Bacteriophage of P. acnes
agtgaaatacctcccttttgtggatttgtctgtttgtcgactttttgtgttggtggtgagtgttgtgcagcctgagcttcctgatagtcgcgattggtgtggggagacgcgtcgttggtggcgtgtgtggggtgaggatagtcgcgcgcagtacgtgtctgatgaggagtggctgtttctcatggatgctgcggtgattcatgattgtgtgtggcgtgagggccgggcggatttggtggcttcgttgcgtgcccatgtgaaggcttttatgggcatgttggatcgttattcggttgatgtggcgtctggttgtcgtggtggcggttctgcggtggcgatgattgaccggtataggaagcgcaagggggcttgagtaggtgtctggtgttgtgggttctcaggttcctcgtcaccgtgttgctgcggcgtattcggtgtctgctggtggtgatgctggggagttgggtcgtgcgtatgggttgacgcctgatccgtggcagcagcaggtgttggatgattggctggctgtcggtagcaatggcaggcttgcttctggtgtgtgtggggtgtttgttccgcggcagaatggcaaaaacgctattcttgaggttgtggagttgtttaaggcgactattcagggtcgccgtattttgcatacggctcacgagttgaagtcggctcgtaaggcgtttatgcggttgaggtcgttttttgagaatgagcggcagtttcctgacttgtatcgtatggtgaagtcgattcgggcgacgaatggtcaggaggctattgtgttgcatcatccggattgtgccacgtttgagaagaagtgtggttgtccgggttggggttcggttgagtttgtggcccgttctcgtggttctgctcgcgggtttacggttgatgatttggtgtgtgatgaggctcaggagttgtcggatgagcagttggaggctttgcttcctacggtgagcgctgccccgtctggtgatccgcagcagattttccttggcacgccgcctgggccgctagcggacggtagtgtggtgttgcgtcttcgcgggcaggctttgtcgggtggtaaaaggtttgcgtggacggagttttcgattcctgacgagtctgatccggatgatgtgtcgcggcagtggcggaagttggcgggtgacactaatccggcgttggggcgtcgcctgaattttgggaccgtaagcgatgagcatgagtcgatgtctgctgcgggttttgctcgggagcgtcttggctggtgggatcgtggccagtctgctacgtctgtgattcctgcggataagtgggctcagtctgcggtggatgaggcgagtctggttggcgggaaagtgtttggtgtctcgttttctcgttctggggatcgggttgctttggcgggtgccggccggactgatgctggtgtgcatgttgaggttattgatgggctgtcggggacgattgttgatggtgtgggccggttggctgactggttggcagttcgttggggtgatactgaccggattatggttgccgggtctggtgcggtgttgttgcagaaggcgttgacggatcgtggtgttccgggtcgtggcgtggtggttgctgatactggcacctatgtggaggcttgtcaggcgtttcttgagggtgttcgttcgggtgttgtgtctcatcctcgtgctgattctcgccgtgacatgttggatattgctgtgaggtcggctgtgcagaagcgtaagggttcggcttggggctggggctctacgtttaaggatggttctgaggttcctttggaggctgtgtcgctggcgtatcttggtgcgaaaacagttaaagtgaagcggcgtgaacggtctggtaggaagcgggtgtctgtggtatgaacgtggacgagttggctctgattgagggcatgtacgatcgtatccaaaggttgtcttcgtggcattgccgtattgagggctactatgagggctcgagccgggtgcatgatttgggggtggctattcctccggagttgcagcgtgtgcagactgtggtgtcgtggcctggtatagctgtggatgctttggaggagcgtctggattggcttggctggactaatggtgacggctacggtctggatggtgtgtatgctgcgaatcgtctatcaactgcgtcatgcgacgtccaccttgatgcactaatttttgggttgtcgtttgttgcgatcattcctcatggtgatggtacggtgtcggttcgtccgcagtcaccaaagaattgtacgggcaagttttcggctgacgggtctcgtttggatgcgggtttggtggttcagcagacgtgtgatcctgaggtggttgaggctgagcttttgcttcctgatgtgattgttcaggtggagcggcggggttcgcgtgaatgggttgaggtggatcgtataccgaatgtgttgggtgctgttccgcttgtgcctattgtgaatcgtcgccgtacttctaggattgatggccgttcggagattacgaggtctattagggcttacacggatgaggctgtgcgcacactgttggggcagtctgtgaatcgtgatttttatgcgtatcctcagcgttgggtgactggcgtgagtgcggatgagttttcgcagcctggctgggtcctgtcgatggcttctgtgtgggctgtggataaggatgatgatggtgacactccgaatgtggggtcgtttcctgtcaatagtcctacaccgtattcggatcagatgcggctgttggcgcagttgactgcgggtgaggcggctgttccggaacgctatttcgggtttatcacgtctaacccacctagtggggaggctttggctgccgaggaatctcggcttgtgaagcgtgctgagcggcgtcaaacgtcgtttggtcagggctggctgtcggttggtttcctggctgccaaggcgttggattctcgtgttgatgaggccgatttttttggtgatgttggtttgcgttggcgtgatgcttcgacgcctacccgggcggctacggctgatgctgtgacgaagcttgttggtgccggtattttgcctgctgattctcgtacggtgttggagatgttggggcttgatgatgtgcaggttgaggctgtgatgcggcatcgtgctgagtcgtcggatccgttggctgcgcttgctggggctatatcgcggcagacgaacgaggtttgataggcgatggcttcgggtgttgcgtcgaggttggctgctaccgggtatcagcgtgaggcggtcaggtttgctggaaagtatgcgggctattatgccgagttgggtcgtttgtggcgtgtcggcaggatgagtgacacgcagtatgttcgtttgtgtgtggagttggagcgtgccggccatgatggttcggcatcgatggctgccaggtttgtgtcggattttcgccggttgaatggtgtcgatcctggtttgatcgtgtatgacgagtttgatgctgctgcggctttggctaggtcgttttcgactatgaagattatgaatagtgacccggatagggcgaatgacacgattgatgcgatggcggcgggtgttaatcgggctgttatgaatgctggtcgtgacacggttgagtggtcggcgggtgcgcagggtaggtcgtggcgtcgggttactgatggtgatccgtgtgctttttgtgccatgttggctacgaggtcggattatacgaccaaagaaagggcactcacttccggtcatacgcggcgtcataagcgtggtggtaagcgtccgtttggttcgaaatatcatgatcattgcggctgtacggtggttgaggttgttggcccttgggaaccaaatagggctgatgccgagtatcagaggacgtatgagaaggcccgtgagtgggttgatgatcatgggttgcagcagtcgcctggcaatattttgaaggctatgcgtactgttggcggcatgagataatttgctgtggtttccggttgtgcgccgccggttattggtgcacagggttgtctcccgcacgggggtcaacaatgttgtgttgttttccgcaaggagtgtagggttaggctatggccgatcagagtgttgaggaacagaatgttgacaatgatgttgtggagtccggaaaggataacggcattgttgatacagtaaaagatgatggcgggcaggaggtagccgacaatcagttgaagaatgaaggcgagggtaaatcgccggggactgattggaaggcggaggcccgtaagtgggagtctcgtgctaaaagtaatttcgccgagttggagaagcttcgtacatcgagtgacgattctggatctactattgatgagcttcgccgcaagaatgaggaactcgaagacaggatcaacgggtttgttcttgagggtgtgaagcgcgaggtggcttcagagtatggtttgtccagtgatgcgatcgctttcttgtcgggtggcgataaggagtcacttgccgagtctgcgaaagctttgaagggtttgatctaccatagtagtggtggcgcgggtgtgcgccgtcttgcggggagtgcccccgttgatgatgttaaacgacgtgagggtgtcgcgtttgtggatgctcttgtcaataattctaggagatgatttgtgatggctgacgattttctttctgcagggaagcttgagcttcctggttctatgattggtgcggttcgtgaccgtgctatcgattctggtgttttggcgaagctttcgccggagcagccgactatttttggccctgttaagggtgccgtgtttagtggtgttcctcgcgctaagattgttggtgagggcgaggttaagccttccgcttctgttgatgtttcggcgtttactgcccagccgatcaaggttgtgactcagcagcgtgtctcggacgagtttatgtgggctgatgctgattaccgtctgggtgttttgcaggatctgatttccccggctcttggtgcttcgattggtcgcgccgtggatctgattgccttccacggtattgatccggctacgggtacgcctgctgcggctgtcaagtcttcgctggataagacgaagcatattgttgatgccacggattctgctacgaccgatctggtcaaggctgtcggtcttatcgctggtgctggtttgcaggttcctaacggggttgctttggatccggcgttctcgtttgccctgtctactgaggtgtatccgaaggggtctccgcttgccggccagcctatgtatcctgccgccgggtttgccggtttggataattggcgtggcttgaatgttggttcttcttcgactgtttctggcgccccggagatgtcgcctgcctctggtgttaaggctattgttggtgatttctcgcgtgttcattggggtttccagcgtaacttcccgatcgagcttatcgagtatggtgacccggatcagactgggcgtgacctgaagggccataatgaggttatggttcgtgccgaggctgtgctgtatgtggctatcgagtcgcttgattcgtttgctgttgtgaaggagaaggatgccccgaagcctaatccgccggccgagaactgatttattgttgcggtgatgtgtcaatgtgcagggggtggtgttgatgggtatcattttgaagcctgaggatattgagcctttcgccgatattcctagagagaagcttgaggcgatgattgccgatgtggaggctgtggctgtcagtgtcgccccctgtatcgctaaaccggatttcaaatatagggatgccgctaaggctattctgcgtagggctttgttgcgctggaatgatactggcgtgtcgggtcaggtgcagtatgagtcggcgggcccgtttgctcagactacacggtctaatactcccacgaatttgttgtggccttctgagattgctgcgttgaagaagttgtgtgagggtgatggtggggctggtaaagcgttcactattacaccgaccatgaggagtagtgtgaatcattctgaggtgtgttccacggtgtggggtgagggttgctcgtgcgggtcgaatattaacggctacgctggccctttgtgggagatatgatatgaccagttttccttatggtgaaacggttgtgatgcttcaaccgactgttcgtgtcgatgatcttggtgacaaggttgaggattgggggcatcctgtagaaaccgtgtaccataacgtggccatctatgcttccgtttcgcaggaggatgaggccgcggggcgtgactctgactatgagcattggtcgatgcttttcaagcagtctgttgttggtgctgattatcgttgcaggtggcgtattcggggtgttgtgtgggaggctgacgggtctcctatggtgtggcatcatccgatgtctggctgggatgcgggcacgcagatcaatgtgaagcgtaagaagggctgatagattgtggctcaggatgtgaatgtgaagctgaacttgccgggtattcgtgaggtgttgaagtcttctggggtgcagggcatgttggctgagcgtggcgagcgtgtcaagcgtgcagcctcggctaatgtgggcgggaacgcttacgatagggcccaataccgtaacggtttgtcgtcggaggtgcaggttcatcgtgttgaggctgtcgctcgtataggcaccacatataagggtgggaagcgtattgaggcgaagtatggcacgctggctaggtcgattggggcagcgtcgtgatcgtctacgatgaccccaggaagtgggctaaacgtgtgttggcggatgatggctggctgtctgggataccatgcacagggacagtgccggatagctttgagggtgacctgatttggttggcgttggatggtggcccgcagttgcatgtgcgtgagcaggtgtttttgcgggtgaacgtgttttcggatacgccggatcgtgctatgtcgttggcgcgtcgtgttgaggctgtgctggttgatggtgtggacggtgatccggtggtgttttgtaggcgttctacgggtcctgatttgctggttgatggtgcacgttttgatgtgtattcgctttttgagctgatatgtaggcctgtcgaatccgagtaagcgtatcgttgtttttgttgattgatttttagtttgattgttttttgggggttatgatggctgcaacacgtaaagcgtctaatgttcgctctgctgttacgggtgacgtctatattggtaaagctcatgccggtgacactattgatggtgtgaagacggttcctgacggtcttaccgctttagggtacctgtcggatgacgggtttaagattaagcctgagcgtaaaacggatgatttgaaggcttggcagaatgcggatgttgttcgcactgtggctacggagtcttctatcgagatttctttccagctgatcgagtccaagaaggaggttatcgagctgttttggcagtcgaaggttactgccggagccgattcgggctcgttcgatatttctcctggtgccaccactggcgtgcacgccctgttgatggatattattgatggcgatcaggttattcgctactatttccctgaggttgagttgatcgatcgtgacgagatcaagggcaagaatggcgaggtgtacgggtatggtgtgacgttgaaggcgtatcctgcccagattaataagaagggtgatgcggtgtcgggtcgggggtggatgacggctttaaaagctgatactcctccttctccgaagcctcagccggatccgaatccgccatctgagaactgatacacgattttaggggattgttgatagatgagtgacacaggttacacgttaaagattggtgactgtagctgggtgttggcggatgcggaggagacggctcaggctgttcctgcccgtgtttttcgccgtgcagctaagattgcccagtcgggggagtctgcggattttgcccaggttgaggtgatgttttctatgttggaggctgccgccccggctgatgctgtggaggctttggaggggcttcctatggttcgtgtggccgagattttccgtgagtggatggagtggaagcctgaaggtaagggtgcctctttgggggaatagtttggctccacggcctgattgatgattatcgtggggccatcgaatatgattggaggacccggttcggttgctcggtttatgatgttggtggcccgcagatgtgttggggtgaggctgtccggctggctggcgtgttgtgtaccgatacgtctagccagttggcggcccaccttaatggttggcagcgcccgtttgagtggtgcgagtgggctgtgctggacatgctggatcattacaggtctgctaatagtgaggggcagccggagcctgtggcgaggcctacggatgagcgtagggcccggtttacgtctggacaggtggacgatattttggcgcgggttcgtgccggtggcggggtgtctcgcgagattaatattatggggtgaatagtgtatgtctggtgagattgcttccgcatatgtgtcgttgtatacgaagatgcctggcttgaaatcggatgttggtaaacagctttctggggtgatgcctgctgagggtcagcgttcgggtagcttgtttgctaagggcatgaagttggctcttggtggtgccgcaatgatgggcgctattagtgttgctaagaagggcctcaagtctatatatgatgtgactattggtggcggtatagctcgcgctatggctattgatgaggctcaggctaaactgactggtttgggtcacacgtcgtctgacacgtcttcgattatgaattcggctattgaggctgtgactggtacgtcgtatgcgttgggtgatgcagcttcgactgcggcggcgttgtctgcttctggtgtgaagtctggcgggcagatgacggatgtgttgaagactgtcgccgatgtgtcttatatttcgggtaagtcgtttcaggatacgggcgctatttttacgtctgtgatggctcgcggtaagttgcagggcgatgacatgttgcagcttacgatggcgggtgttcctgtactgtctttgcttgccaggcagacgggtaaaacctcggctgaggtgtcgcagatggtgtcgaaggggcaaattgattttgccacgtttgcggctgcgatgaagcttggcatgggtggtgctgcgcaggcgtctgggaagacgtttgagggcgctatgaagaatgttaagggtgccctgggttatcttggtgctacggctatggcgccgtttcttaacgggttgcggcagatttttgttgcgttgaatccggttatcaagtctatcacggattctgtgaagccgatgtttgctgccgtcgatgctggtattcagcggatgatgccgtctattttggcgtggattaaccgtatgccgggcatgatcacgagaatgaatgcacagatgcgcgccaaggtggagcagttgaagggcatttttgcgagaatgcatttgcctgttcctaaggtgaatttgggtgccatgtttgctggcggcaccgcagtgtttggtattgttgctgccggtgtggggaagcttgttgcagggtttgccccgttggcggtgtcgttgaagaatttgttgccgtcgtttggtgctttgaagggtgccgctggcgggcttggtggcgtgtttcgcgctctggggggccctgtcggtattgtgatcgggctgtttgctgccatgtttgctacgaacgcccagttccgtgccgcggtgatgcagcttgtggctgtggtgggccaggccttggggcagatcatggccgctattcagccactgtttggtttagttgctgggctggtggcccagttggctcccgtttttggccagattatcggtttggtggctggtttggcggctcagcttgtgcctgtgattggtatgctggttgcccggctggttcctgtgatcacgcagattattggcatggtgacacaggttgctgccatgttgctgcctacgttgatgccggtgttgcaggctgttgttgctgtgatacggcaggttgttggcgtgatcatgcagttggtgcctgttttgatgcctgtgattcagcagattttgggtgctgtcatgtctgtgctgccgcctatcatcggccttatccggtcgctgataccggtgatcatgtcgattatgcgtgtggtggtgcaggttgttggtgccgtgctacaggtggtggcccgtattattccggttgttatgccgatttatgtttcggtgattggattcattgccaagatttatgctgcggttatcgtttttgaggctaaggttattggcgctattcttcgtgctattacgtggattgtgaatcattcagtgtctggcgtgaggtctatgggcacggccatccagaatggctggaatcatatcaaatcgtttacgtcggcgtttattaacggtttcaagtcgatcatttctgccggtgttgccgcggttgtggggttttttacgcggcttggtttgtcggttgcctcccatgtgaggtctggttttaacgcggctcgtggcgctgtttcttctgcgatgaatgctattcggagtgttgtgtcttcggtggcgtctgctgttggcgggtttttcggttcgatggcgtcgagggttcgtagtggtgctgtgcgcgggtttaatggtgcccggagtgcggcttcttctgctatgcatgctatgggttcggctgtgtctagcggggtgcatggtgtgctgggttttttccggaatttgcctggcaatattcggcatgctctcggtaacatggggtccctgttggtgtctgctggccgtgatgtggtgtctggtttgggtaatggtatccggaatgctatgagtggcttgttggatactgtgcgtaatatgggttctcaggttgcgaatgcggcgaagtcggtgttgggtattcattccccgtctagggtgtttcgtgatcaggttggccgtcaggttgttgctggtttggctgagggtattactggtaatgctggtttggcgttggatgcgatatcgggtgtggctggtcggctgcctgatgcggttgatgcccggtttggtgtgcgttcgtctgtgggctcgtttaccccgtatggcaggtatcagcgtgcgagcgagaagagtgttgtggtgaatgtgaacggacctacgtatggggatccgaacgagtttgcgaagcggattgagcggcagcagcgtgacgctttgaacgcgttggcttacatgtgatatggggtgttgtgcatgtttattcctgacccgtctgatcgtgccggtttgactgttacctggtctatgttgccgttgattggtaatgatccggagcgtgtgcttcatttgacggattatacggggtcgtcttcggtcatgttgttgaatgattcgttgcgcggcctgggtgttcccgaggtggagcatttttctcaaactcatgttggggtgcacggctcggagtggtgcgggtttaatgtgaagcctcgcgaggtgacgctgccggtgttggtgtcgggtgttgacccggatccggatggcgggtttcgtgacggtttcatgaaggcgtatgacgagttgtggtctgcttttcctcctggcgaggagggggagttgtctgtgaagactcctgccggcagggagcgtgtgttaaaatgccggtttgattcggctgatgacacgtttacggttgatccggtgaatcgtggctatgcgcgttatgtgcttcatttgacagcttatgacccgttttggtatggggatgagcaaaagtttcgtttcagtaacgcgaagttgcaggattggttgggtggcggcccggtcggcgggaagggtacagcgtttcctgtggtgttgacgcctggtgttggttcgggctgggataatctgtataataagggtgatgtgcctgcgtggcctgtgattcgtgttgaggggcctttggagtcgtggtctgtgcagattgatggtttgcgtgtgtcttcggactatcctgtcgaggagtataattggattactattgatacggatcctcgtaaacagtctgcgttgttgaatgggtttgaggatgtgatggatcgtttgaaggagtgggagtttgcgcctatcccgcctggcggttcgaagagtgtgaatattgagatggttggtttgggtgccattgttatgtcggtgcagtacaggtttttgagggcttggtgaacggttgtggctggtcttgttccgtatgtaacgttgtttacgccggattatcgccgtgtggcgcctatcaatttttttgagtcgttgaagttgtcgttgaagtggaatggtttgtccactttggagttggtggtgtcgggtgatcattctaggcttgacgggttgactaggccgggtgcacggctggttgttgattatggtggtggccagattttttctgggcctgtgcgtcgggttcatggtgtgggtccgtggcggtcttcgcgggtgactatcacgtgtgaggatgatattcgcctgttgtggcgtatgttgatgtggcctgtgaattatcgccccggtatggttggtatggagtggcgtgccgacagggattatgcccactattcgggtgcggcggagtcggttgctaagcaggtgttgggggataatgcttggcgttttccgcctggtttgtttatgaccgatgatgagagtcgtggccgctatattaaggattttcaggtgcggtttcacgtgtttgccgataagttgttgccggtgttgtcgtgggctcggatgactgtttcggtgaaccagtttgagaatgtgaagcaggatcagcgtggtttgctgtttgattgtgtgcctgctgtgacgcgtgaccatgtgttgactgccgagtctgggtctattgtgtcgtgggagtatgtgcgtgacgccccgaaggctacgtcggtggttgtgggtggccgcggcgagggcaaggatcggctgttttgtgaggatgttgattcgatggctgagggtgactggtttgatcgtgtcgaggtgtttaaggatgcccgtaacacggattctgagcatgtgcatctcattgatgaggcggagcgggtgttgtccgagtcgggggccacgtcggggtttaagatcgagttggctgagtcggatgtgttgcggtttgggccaggcaatctgatgccgggtgatttgatctatgtggatgtgggctcggggcctattgcggagattgtgcggcagattgatgtggagtgtgtatcgcctggtgacggttggacgaaggtgactcctattgcgggggattatgaggataatccgtcggccctgttggctcgccgtgtggctggtttggctgcgggtgtgcgggatttgcaaaagttttagtaagtgattggggtttgttgtgggtattgtgtgcaagggttttgatggtgtgttgaccgagtatgattgggctcaaatgtctggtctgatgggtaatatgccgtctgtgaaagggccggacgattttcgtgtcggcactactgttcagggtgccacagtgttgtgtgaggtactgccggggcaggcgtgggctcacggggtgatgtgcacgtcgaatagtgttgagacggtgacggggcagctgcctggtccgggtgagacccgatacgactatgttgttctgtctcgggattgggagcagaacacagccaagttggagattgttcagggtggccgtgcggagcgtgccagggatgtgttgcgtgccgagcctggcgtgtaccatcagcagttgctggcgactttggtgttgtcgtctaacgggttgcagcagctgctggataggcgtgctgtggcggcccgtgtggcgtttggggagtctgcggcttgtgatcctaccccggtggagggtgaccgggtgatggttccttctggggctgtgtgggctaaccatgccggcgagtggatgctactgtcccccaggatcgaaactggttctaagtcgatcatgtttggcgggtctgctgtgtatgcttacacgatcccgtttgcccgcccgtttggtagtccgccggttgtggtggcgtctatggctacggcggctgggggcacgcagcagatcgatgtgaaagcctacaatgttactaataaggattttggtttagcgtttattacgaatgatgggtctaagccttctggtgtgcctgcggttgcgaattggattgctgtcggcgtgtgaccgggctgttgcggctgatgttgtaatgttgggtggctgtggtgtcgtggattactcctgcactggtggcttctatctgtacggcgttggccacggttttgggttctgttccggcggtcacgtctaaatctcggaggcgtttgcggcggctgtcggctcaggtggatgctttggaggagtatacgtggggtgtgcggcgtgaggttcgccggtttaacgccgggcttcctgatgatgtggagccgatgcatctccctgatgtgcctgagtttttgaaagatactgttgatggtggaggtgagcagggttgagggagttggaggaggagaagcggcagcgccgcaatttcgagaaggcttcactgatactgttgttcctgtcgcttgtgctgttggcggtggttgccgggggtgctttacggtacgggtttgtggcttcgcaaagggattcggagcaggcgagggcccagtctaatggtacagccgctaaagggttggccaaccgtgtgaagcgggtgtgtgcttcgggtgggcaggagtcggtgcggcttcaccagtctggcttgtgtgtggatgctcagcgtgttgagcggagtgtgcagggtgtgccgggtcctgccggtgagcgcggcccgcaaggccctgcaggtgctgacggccgggatggtgttaatggttcagctgggctggttggccctgttggtccgcagggttccccgggtttgaatggtgtgaaaggtcctgacgggctgcctggcgctaacggttcggatggccatgatggtgttgccggtgtgaacggcgttgatggccgggatggcgctgatggggctgatggtggccgtggccctgccggccctcaaggtgcacagggtgagcgtggccctgtggggcctcagggtccgcagggttctgccggtgccgatggcacgaatggtcgggacggcaaggatggcaaggatggccgttctgttgtgtctgtgtactgttccggggatcgcctggttgtgaaatatagtgacggtgcggtctctaccatatcgggttctgtggcctgtgagggtgtgaaaccgtcgcctatagtgactatatcatcccacaaatagaaaggagtggctgtgatggtagtgtttgggggtggcgtgttgtgagatacattccagcggcgcatcactctgccggatcaaataagccggtgaacagggttgtgattcacgcgacatgcccggatgtggggtttccgtccgcgtcccgtaaggggcgggcggtgtccacggcaaactatttcgcgtccccatcggcgggcggttctgcccattatgtgtgtgatgttggggagacggtgcagtgcctgtccgagtctacgattggttggcatgccccgccgaatccgcatagtttgggtatagagatttgcgcggatgggggttcgcacgcctcgttccgggtgccagggcatgcttacactcgtgagcagtggctggatccgcgggtgtggcccgctgtggagcgtgccgctatcctgtgtcggcagttgtgtgacaagcatggtgttccgaagaggaaactgtctgtggccgatctaaaagcgggtaggcggggcatctgcgggcacactgatgtgacggatgcgtggcaccagtcggatcatgacgatccgggaccgtggtttccgtgggacaggtttatggctgtggtgaatggccacggcggcggttcaagtagtgaggagttaacggtggctgatgtgaaagcgttacataatcagattaaacaattgtctgctcagcttagtggttcggtgaataagctgcatcacgatgttggtgtggttcaggtgcagaatggtgacctggcgcgccgtgtggaggccttgtcgtgggtgaagaatccggtgacggggaagctgtggcgcactaaggatgccctgtggagtgtctggtattacgtgttggagtgtcgcagccgcatcagtaggctcgagtctgctgtcaacgatttaaaaaagtgatggtgatgtgtgatgggtaaacagttttggttaggtttactggagcgggcggctaagacttttgtgcaaacgtttgttgctgtgttgggggtgacggcgggtgtcacgtatactgcggagtcgtttcgtggtttgccgtgggagtctgccctgatcacagctacggttgctgcggtgttgtcggttgctacatcgtttggtagcccgtcgtttgtggccggcaaacctaaaaccacgcctgtggatgcttggcttgttccacccgacgatgggggcatggtcgagcctcacatggttgatgtgtcggatcctggcatgattgagccgatggatgatgcggatgttgtcggctatgagcctcggcgtgcagccgaggctgaggttggcacggtagagtctactgttgcataattgaatatgtgtgtgccccagcggtgctgccacgatcgtgtggtggttgccgctggggcactatttttgtgtctatagtattctatgattcgttgttgttgatggtttcttcgatcagctggtccaggcggtggcaggcggagatcgtttcgttggcctggtgcggaacatcctggccgataacatttttgtggttgtcgcggtggcagatgattgactgcatgatatcgtcggcctccgcttgcagtagttttgcctggtatgcgatcccggcgagccaatctatggcttcctggcttgcctgtgtgtcgtatggaatgccacgggtgttgctgttgtttgggtatcctgcactgtcgcagtcccacaggatttcgctgcactcgtctagcgtgtcctggtcgatagcaaggttgtcgaggctgacttctttgacggtaaggttcacgttgtcgagtgagatgggtacacggtactggttttctacactgtcaacaatgttttgcagctggttcatgttggtgggctgttgttggatgattcggtgtaccgctgttttgagggcagtgtaggtgatattggttgtgttgttcatggttttatttcgtccctgtgctgtcgtcgctatcgtctggatagtatctactgtttgcgtagcctgttagggtgatgagtgtttggtctgcccactgtttcacggtttgccgggtgactccgagtcgttgggctgccacagagtaggtttggtcatacccgtagacttcccggaatgctgccagcctagctaaatgttttcgctgtttggatggctggcaggtgagggtgtagtcgtcgatggctagctgcaaatcgatcatggtaacgatgttgttgccgtggtgttgtggcgcggttggtgggggcggcattcctggttcgactgatggtttccatgggcctccgttccagatccattgggcggcttggatgatgtcggcggtggtgtaggttcggttcactggtcatcccctgaataggttgtcgaggttgtctgggttgctggtgttggtggtgtcgaatcgtcccacacagtggcagtagtcgtacatgagtttgataatgtgttggtggtctcccaaataggtgtttccgctgatgctgtaggtggctgtgccgtctttactgatggtgtatttggcggtgatggtttcgggtgtttctgtgttggtgatgatggctgtggtggtggtgcctacggtttgtagcctggtggtttgggtgccgtcgtcgaggatggttgtgaccatggtgtgtgttctcccctttcagatgctggtttggttgtcggctagatgaatgatatcggttaaaggtttcggttggtcgaggtgttgtatggttttgttggctagccgtttggctaccctgtagcacattttggtgtagtgtttgttgtctaggttgtggtattgttcccgcaccgcaatgtatagcaaagagtcttggtacaggtcgtctgcactgattgcggggtagtgtccggctgttttggtgcatgcccggttgagtgtgcgtagatgatggtctgtggcccatccccacgatgcggtggtggctaggtctgctttggttggtcgtctgctcatgtcatctctttcatctggctatctggtagttgtttggtgttttgttgttgatagtgtagcacacgagtccggggtttccggtggtgcctgtcttgtgccggtaccatgtggattcgccttccatggatgggcattggatgaaggtgcgttgtccttgctcggagatttcgaggtggtgccggtgcccggccatgagaatattagatacggtgccgttgtggaattcttggccgcgccaccaatcatagtgtttgccggtgcgccattggtggccgtgggcgtgcaggatttgtgtgcctgccacgtcgacggtggtggtcatttcgtctcggctggggaagtggaagtgtaggttggggtattggttgttgagctggtaggcttctgcgatggcgcggcagcagtccacgtcgaaggagtcgtcgtaggtggtgactccttttccgaagcgtacggcttctccgtggttgccggggatggatgtgatggtgacgttggcacagtggtcgaattggtggatgagttgcatcatggccatgcgggtgagcctgatttgttccgtcaagggtgtttgtgtgcgccaggcgttgttgcctccttgtgacacgtatccttcgatcatgtcgccgaggaaggcgatgtggacccgttgcggtttgcctgcttgctgccagtagtgttttgcgactatgagggagtgcaaatagtcgtcggcgaagtgtgctgtttctcctccggggatgcctttgccgatttggaagtctcctgccccgatgacgaaggccgcagtgctgtagtcggtgtgggtgtcttgttcgggttttgggggtgtccattcggctagtttgttgacgagttcgtcgaccgggtaggggttggttgcgggttggtggtcgatgattttttgtatggatcggccggtttctccgttcggtaaggtccattcggagatgcgtgtgcggcgtacggtgccgttggcgagattgtcgtcgatggtgtcgatggcgttgtcgtggttggctagctgtgtgagtagccggtctatattgtctatcactggttttcctcttctgtttgtggggtggtgttggcttgtttgcggcgatagtctttgatgacggtggcggagatggggtatccggcttcagtgagcatttgggctagctgtgtggcggggatggacctgtcggcgagtacgtcggcagccttatcaccgtagcgttggatgagggtttcagttttggttgccatgatgtcctaggggttgtgtggtgggttgccatcctgtgcggcagtcgccgtcgtgtcctggtttgcgggtgcaccatgatacgttgctggcattgtggatgatggcgcggccgcatatgacgtcttgtaggtgttcgggaaacttgccgttgttgtccctgtttgtgtcggtcacgtgtggggttgtggtgaccatcatgtctcctctgcgtgaaagagtgtgcaaatatgatgcgggtgtggtgggtgtttatgcgggtatggttttcatcaccttgctgaatgttacttggttattgtacatcatttgggtgatttcctggtcggttttgtcggggtgttgttttcgcaggtttgcccattggcaggcgttgtcggtttcctgctgtaaacgtgtcaggtgttgttcgttgatgatgtgtttccacatggtccatgacacgtcgagccggttaaggatttcgagggctggcacgttgaactggtcgaggaagagtatttcctccgtgtagtagtctttttcgtattggtcccatccgcttcggtgcctgttgggctggtttttggggtaggcttcccggcagattttgtgtaaccgttttgccatgtcgtcgggtagtttaatgtcggggttggcgcggatcatggatcgcatcccgtcgtaggtggtgccccaggtgtgcatgatgtggagtgggtccacgccgtcggcccatttttctgcacagatggcgaggcgtgtgcgtctcctagtggccttactcgtgtcgcggcggccggggatggggcatgtgtcgaggggatccatgatgttttctatgcctttcttggagtgatgttttgtttgtctggttttattgtagcacagtgtctagtgcttgtgtcaaccctgtttttccggcctgcagataggtgtctgtgacatccccgacagtgaggggtacgtgtatggcttgggggagtgccgtctggagggtttgggccatctggtctcctgctttgtcggggtcggaccagatgtagattcggtcgtagccttcaaaaaatttggtccagaaagtttgccacgaggtggccccgggtagggctacggccgaccatccgcattgttcgaggatcatggagtcgaattcgccttcgcaaatgtgcatttcggctgccgggttggccatggcggccatgttgtagatggagcctgtgtcccctgccggggttagatatttggggtggttgtgggttttgcaatcatgctggagtgagcagcggaaacgcatttttcgtatttcggctggctccccccagacggggtacatgtatgggatggtgatgcactggttgtagtcttcgtggcctgggatggggtcattgtcgatgtatccaaggtggtggagccgggctgtttcttcgctgatgcctcttgccgagagcaggtcgagtatgttttcgaggtgggtttcgtagagggctgaggctttctggattcggcggcgttccgcaatgttgtagggttgtagtgagtcgtacattagggttttctttctctagtcgttgtttcagtttggcgaggcctcctccgataccgcatgtgtggcagtaccagacgcccttgtcgaggttgatgctcatggagggctggtggtcgtcgtggaacgggcagaggatgtgttgctcgttcctggaaggattgtagcgtatctggtaggtgtcgaggaggcggcaggtgtcagaggtgtgggaggagctcgttgagggttgataccacataggcttcgctccagggtttgttgcgctgtttcatgatgacgagtccgatggtggactggttttcgcggttgcggtgggtttcgtagttgcgtgcctcccggctggcttgtttcacgaattcggcgaggtggggctgtccggctttggcttctattacataggttttgtggccggttgtgaggatgaggtcgccttcgtcttcccttccgttgaggtggaggcgctctatatcatggccggtgtcgcgtagctggtggaggagtcgtgtttcccattctgcgccggcccggcggttgcgtgactgttgtgtcgacatgatagtcctttgtgtgttggggtcatgttccatggctgtttttcggcgagtggcccgaagaatgtgtattcggggtaggctcgcagtcgttcgtatcgggtgccgtctgggctggatttgcctgtgcgctgttttaacacggcgatgcgtgcctctgccggtatcgataggccgttgccgttatcctcgccaccatacagggagactcccaatatgagttgtggtttttcggagaggccgtttttgatttcccgcctagccggggggtgttctatgtcggagccggttttgtcggttgcgtggtgtgtgacaataatggtggagccagtatccctgcctaatgatgtgatccattgcatggcttcttgctgggcctgatagtcactctcgcagtcttgaatgtccatcagattgtcgataacaatgagtggtgggaaggtgttccacatttccatgtaggcttgcagttccatggtgatgtctgtccatgtgatgggtgactggaatgagaatgtgatgtgttggccgtggtggatgctgtctcgatagtattctggcccgtagtcgtcgatgttttgttgtatctgggcggtggtgtgttgggtgttgagtgagatgattcgtgtggaggcctcccagggtgtcatgtcccctgatatgtagagggcgggctggttaagcattgctgtgatgaacatggctagcccggatttttggctgccggaccgccccgcgatcatgaccaaatcccctttgtgaatgtgcatgtccagattgtcatacaagggtgctagttggggtatgcggggcagttcggcggctgtttgggaggctctctcgaaggatcgttgtagagagagcatcggagcctttatctatctgtctatcggttggatgatgttttggtggtcagatggagtcgatatcgatgtcagcatcagcaggggctgtggtgtcgtctagctggccgttatcgcgtttgtctacgtattcggcaaccttatcgtagatggcgtcatcgaggggtttaagcacgaccgcgttgaacccgtttttggtgcgcacggtggcgagtttgaaggcctgctcctcgccaaggtatgcctctaggtcgcggatcatggagtgtgggcggtcgttgttgccgcgtgctttctcaataatagcgttggggatggtttctggggtgccgttgttgagatcgtctagggtgtggaagattgtgacatcagcgtaaatacgatcggcggtctgtccaccgtagccttcggtgttgtgttccacgtctcggactttgaaggcgatggcggtggcgtcctggtttcgggacgggttgaagaaggtgctgttgctgttgttgttgcggtagttggcgagtcccattgttgtttcctttactgtttgtgttgttttgtttgttggtttgtgtcggttttatcgggtgaggctgtttcgtttgttgcggaaagcctcggatacgtcactgttgctggtgatggtctttttgtattgtttgagaaggtcggctagctgtgccttgcttgtggctttgttgattttgtcgatgatggtgttgtttccttctgaggcgatgttgtctacgtagtctttggcggcctggttgtatcggtcttggaggatgatggatgctgtggcgatcagtgttgccaggtcccagttccttgccgcggagctgtttttgagtccgcctagcaggtcgatgatagtcttcttgacttggtcggcggtgtctccgcggatgacggtccatggggcggcgtagtcgcctccgtatttgagtgtgacggtgaatcggtcgtcgtctgtgttgtcggtcactggtgctccttgctttcttgtgttggggctgtgatggtggtttctatagggtacctgtaggcgtctttcccgttgacagcccagcaggcgtccttgacggggcagcctttgcagagtgctgtgacgtggggtacgaagatgccttggctgattcctttcattgcttgactgtacatggatgatacatgccggtaggtgttgttgtcaaggtcatagagttcggtggatgtgccttgtgtcggggacttgtcgtcgttgcggctggtggctggcgtccaaaacatgccttttgtcacatcgttgccgtgttggttgagcatgtacctgtaggtgtgcagctgcatactgtcggcgggtaggcgtccggttttgaggtcgagaatgaaggtttcgccagtatcggtgtcggtgaaaacgcggtcgatgtagccaacgatctgggtgccgtcctggagggtggtttctaccgggtattcgatgcctggctggccgtcaataacagcgatagcatattctggatggttgcgcctccagtttttccacctgtccacaaaggtggggccgtatatcatccaccaattgtagtcttttttgtgtggcccgcccgactcgcacatgtttttgcacaccctgccggagggtttgatttctgtgccttcggattcggcgagggcgacttgggtgtcgaaaatgtttttgaaggatgagagtttgtctggtagtgcagggtattcggtggggttgtacaggtgtaggtcgtattgttcggtgatgtggtgtatggcgcttccggcgatggtggcgtaccaggtgtggtgttgggcgtggtagccgtgggataggcgccatttttctccgcattcggcccactgtgacagtgatgagtaggagatgtggcctggatggtcgatggtggatggtttttgtgctagggacattacttgtcgcctttgtgggtgttccatgggttgcgggtgtcttggccggcgtggtgttgctggtatgcgaggagtgcgaggcagtgccaggcagcatgggctagatggggtagcccggattcatcatcgaggttgttgccttgctgccatgatagtaggtgcctgtagagggcgtcgacgctgtggctccacgggtagccgccggtccagttgttgtcgccgtatttggtggcgccgtatcctgccacggagcctagatcgtgcaaggctgcggggtcgatgagggatagcctgcagagtttcaattcttttcgggcaccggtgttggggtcggtgtacatgcgggtgggctcatccatggggtgtgtgctccttgagtgtgggttactggttggggttgtgggcgagtgctacggcgagaataatgatggcgagggtttcagcaataagtatgggtgttgtgatcatttagtgtctcggggattgttggtgagggttgaggcgcctaggagggtggtgagggcgcatgcggcgatgatggcgagggctgccttgtgtggggtgccggttgcgtacatccatgtgatgatggcgccttggatccaggcgaggctggtgaagaacgtttcgtagctgtgtagctcaatgttgttgggtgtgttcatgcttgctcctgaagaatggtgttgatggttttataaatgttgtacaggtcggtttcgatagataacagttggtggatttcgtggtcgagatcaatgtctgggttgagggtgttgatgcgggaggcaatatcggtggctgtgcgtagtgtgccgccggtgtggtgaataatgtgtgccgtgtcggcgagtccggtggtgacagcgtagtgggagaggagaggcatagctggggggtgctccttggcgggttactgttgcgggttgatgttgaggtcggtgacgtgcgggtggtcttctgttccggtgacgaggcagtggacggtgacgggtagtttggatgctcccggctggcggacggtggcgccgtagacgatggagaaggtgtctttgccaataattttgtggagttggaggtcgatgtcggggttgccgttccagttgacaccgtgtgcggcggcctgttgttcggctttgcggttgcaggtgtgtgcggccgtgatcatggtgagaccttgtgaggtttcttcaccccttgtttgggcttgccggtgggctttccgctgttcggctcgcagtgactgttctgcggctgcctgccgtgctttcttgtcggctttgcgctgttggacggttttgggggtccattcggtgttggctgtggtggcctgtggggcgggttgtgaggtgagtggcggattgtcgtctggggctggcatgaatgaggcggcggcaatgatggcggctgtgattccggcgatggtgtagcctgttttcttgttcatgattgttgtcccctttccggggtgttgttcgttgctgacatgatcaatacttccagtgactggacctcgtgtcaaggctgcgctcaacgattgtgagcgatcattgtatggctaggggttttatcggctgtacagggtgagtaggtggccaacattgatacgggtcacgttccagtagagttgtgtggcttctccaccggtgagcggcttccactcgtcgtggctgaacacggtgccatcggatgcgatgaatgtgttggggcgtagcttgtggagttcggcttccacgctctgccggtaggcttcggcgaggctctcaaaatccatgtggtcgcaggagaggttttcgaggcgtgtcaggtcgaagggtgtggggcagtcgtagctggcggggctgtagagctgggtgaagtggttggcgatcttctgcatcatgattccttttctggtgatggtgtgttgatggttttatcgtgtggcttcggcgatgatagcgtcgaggtcgatcatgtcgatcatgtcgtggagttcctcagcctcattctcagataggtggcgccagtcacagtctccgtatacggcgccgtcgagggtgacagtccacagtggccggatgagtcgtatggcttcttgtactttagcgtggtacatgcggcgcaccatatcgagatcgatgtcgtctgaatggtttccggtgaggctgtggaggctgagcgggtcgatctcggtctgcccgtagagggaggtgatggatggggtaatgagtgtggtggccatttttggtgtgttcctttcggtggtgtatgggttgttgtggtttctagagtgtgcgggctgcgaccccacagtcaaggctgcgctcattcggattgagcgtttcatatgagtgtggcatgggatgtggtgtatctcacttaagcttttattgcctctctcagcgtctcaaatcttctggaggtaggagattatagggttggccctgctgatcgattctaggccccatacagggcgtctcaggggcatgtatgggtgatagcgggtgtggcagatgatctagcgagtcgagatagtcctgcattgtaaaggtcgaggtgtcagatctgggcatggaatccacacccccatactatgtgagatgtatcacatcctcctgacttggtgtgcaccctcgaggccatcctgtcgatctggcgtgaagggtgtagcccagaaatgccgtttaaagccttcacactgcgcctaggagcgccttgcagggtgggggctaggtgtttatacccccaagcaattctgatcgattctagacgcctcccagagcctgatacgcgatccgctatccagacacagaccatcagcccctatcctggttagctaagcctcaactatgtggacagtgtgggatgctaagagggaagaaggacacggtacaagaaagagggggagcatcagccttcaagccttaaggtcttagcgcttggcaccgagcccctcaagggcttggcatcagcccgacagcccgagcaggctcagccgaacaggcacagcaatgaaaagggtacacgccatcagggaaggtttgagagtacgaggagccctagcgacgagtactctcaaacctgagggaacaccctcagcactgatgggcctagcgtgttcggaaaggacacgggtcaaggtgtgacagctgtccgggagtgaaacccgttctgactaggggtttcagccttaaccaccctcaaaggttacaagaatctaagaaaatttaaggaaaagtttaggtttaatttttggacctttactaccaaaaacacccgtttacacccctcaaacccgcctatagagccaaaaccaccagtttgactcatcccaggtggggtatgataggctggacaggtagccagctggacgcaaggccgaaatccgctgacgcggctttcacccttacatccatcagtctaccaaacacttaaagacataagggcttagcgctaaggtgctgatagcttagcaccgagcccctcaagggctcggcatcagtcttaaagccttcaacacttaaagtacatataaaactttaaaagttaaacgttaaaagctttaaaccttaacacctaagttaagtataaaaccttaaaagcttagcacttaaggatataaactttacatcagtgtttaagacttaaaaccttaaagctttaaacacttaaagtaactataaaacattaaagaccttaagtacttaaagttaaccatcagtcttaaactttattattataacctataagtcttaaagcttataggtattataatataatataagttataaaagttttagaagagctaaggggttaacttctttacttctcttctctctttggtactttctctcttctcttcttttcttcatcaggggagaagaggaacctttaccatcagcgccgatgggctttcaccgtgtgactcgtgtaccaccggtcgcacgctcccggttgcacactccccacacttactctacccgtgtccctttcaggcttggcgtgttcggctgaaggcgtacggcgtgtcacgctctcatccttaacaccgggtgagacttaaagtgtatattatatgtagaagactttaaaacctatcaggtgttcccgcttagcccgtgtcctacatcgccaagcgctaagccttgaaacgcgaacacacacccacccccatttttcttccgtatccttctcttttaacacagctggggggcgatgtgatctttctcacacccaggggggtggtggagaaaacaaacaccccggcacaaacagaacaccccctcaaacgaacaaaacagggcctagaatcgatcagcagggcatcggtagggtattcatacccccaacggttcccaggccgttacaggggcaatgagaggctcacgggggcaaggggagatcaggggacgtgatggcacataccaaccgcaccgcatcctccgcccatcgacgctggcggcaacgactcatcacccaagcacgacagcaaggccaaaccacctgcccactctgcggagtcaccatcacctggggcacacacgacctaccaaccagccccgaagccgaccacatcacacccgtcagccggggaggactcaacaccctcgacaacgggcaaatcatctgcagaacatgcaacagaagcaaaggcaacagaacacaaccaaacatcacattccaacaacaaaccacaaaaacattgattccatggtgacaaacccgccaacccccaccggggacaccccctgcacaggcgtgcaagacc

SEQ ID NO: 34 - DNA, 29514 bp, Bacteriophage of P. acnes
agtgaaatacctcccttttgtggatttgtctgtttgtcgactttttgtgttggtggtgagtgttgtgcagcctgagcttcctgggtctcgtgaatggtgtgaggagacgcgtcgttggtggcgtgtgtggggtgaggatagccgcgcatcgtacgtgtcggatgaggagtggctgtttcttatggatgctgcggtgattcatgattgtgtgtggcgtgagggtcgcgcggatttggtggcttcgcttcgtgctcatgtgaaggcgtttatgggcatgttggatcggtattcggttgatgtggcgtctggtggccgtggtgggggttctgcggtggcgatgattgaccggtataggaagcgtaggggtgcttgatgtctcaggttgtgggttctcaggttcctcgtaaccgtgtggctgcggcgtattcggtgtctgctggcggtgatgctggggagcttggtagggcttacgggttgacgcctgatccttggcagcagcaggtgttggatgattggctggctgtcggtggtaatggcaggcttgcttcgggtgtgtgtggggtgtttgtgcctcgccagaatgggaagaacgcgatccttgaggttgtggagttgtttaaggcgactattcagggtcgccgtattttgcatacggctcacgagttgaagtcggctcgtaaggcttttatgcggcttcgatcgttttttgagaatgagcggcagtttcctgacttgtatcgtatggtgaagtcgattcgggcgacgaatggccaggaggctattgtgttgcatcatccggattgtccgacttttgagaagaagtgtggctgcagcggttggggttcggttgagtttgtggctcgtagccggggttctgctcgcgggtttacggttgatgatttggtgtgtgatgaggctcaggagttgtcggatgagcagttggaggctttgcttcctacggtaagcgctgccccgtctggtgatccgcagcagattttccttggtaccccgcctgggccgctagcggacggtagcgtggtgttgcgtcttcgcgggcaggctttgtcgggtggtaaaaggtttgcgtggacggagttttcgattcctgacgagtctgatccggatgatgtgtcgcggcagtggcggaagcttgcgggggatactaatccagccttgggtaggcgtctgaattttgggaccgtgagcgatgagcatgagtcgatgtcggcggcaggttttgctcgggagcggcttggctggtgggatcgtggccagtctgctacgtcggtgataccggccgataagtgggcgcaatccgctgtggatgaggtttctttgtctggcgggaaggtttttggtgtctcgttttctcgttctggggatcgtgtcgcgctagctggcgccggcaagactgatgctggggttcatgttgaggtgattgatgggctgtctggcacgattgttgatggtgtgggccggttggctgattggttggcgttgcgttggggtgacactgaaaagattatggttgccgggtctggtgcggtgttgttgcagaaggctttaagtgatcgtggtgttccgggccgtggcgtgattgtggctgatactggggtgtatgtggaggcgtgtcaagcgtttcttgagggtgtcaggtctgggagtgtttctcatcctcgtgccgattcgaggcgtgacatgttggatattgctgtgaggtcggctgtgcagaagaagaaaggttctgcgtggggttggggttcctcgtttaaggatggttctgaggttcctttggaggctgtgtctttggcgtatcttggtgcgaagatggcgaaagctaggcggcgtgaacggtctggtaggaagcgggtgtctgtggtatgaactcggatgagttggctctgattgagggcatgtacgatcgtatccaaaggttgtcttcgtggcattgccgcattgagggctactatgagggctctgcccgggtgcgtgaccttggtgtggctattccgccggagttgcagcgggtgcagacggtggtgtcgtggcctggtatagctgtggatgctttggaggagcgtctggattggcttggctggacgaatggtgacggctacggtctggatggtgtgtatgctgcgaatcggcttgctacggcttcgtgtgacgtgcatttggatgcgctgatttttgggttgtcgtttgtggctgttattccccagggggatgggtcggtgttggttcgtccacagtcaccaaagaattgcactggccggttttcggctgacgggtctcgtttggatgcgggtttggtggttcagcagacgtgtgatcctgaggtggttgaggctgagcttttgcttcctgatgtgattgttcaggtggagcggcggggttcgcgtgaatgggttgaggtggatcgtataccgaatgtgttgggtgctgttccgcttgtgcctattgtgaatcgtcgccgtacttctaggattgatggccgttcggagattactcggtcgattcgtgcttacacggatgaagcggttaggactttgcttgggcagtctgtgaatcgtgacttctacgcctatccgcaaaggtgggtgactggcgtgagcgcggatgagttttcgcagcctggctgggtgttgtcgatggcttctgtgtgggctgtggataaggatgatgacggtgataccccgaatgtggggtcgtttcctgtcaattcgcctacaccgtattcggatcagatgcgtttgttggcgcagttgacggcgggtgaggctgcggttccggagcgctatttcgggtttatcacgtctaacccgcctagtggggaggctttggctgcggaggagtctcggcttgtgaagcgtgctgagcgcaggcagacgtcgtttggtcagggttggttgtcggttggtttcctggctgccaaggcgttggattctcgtgttgatgaggccgcgtttttcggtgatgtgggtttgcgttggcgtgatgcttcgacgccgactcgggcggctacggctgatgctgtgacgaagcttgttggtgccggtattttgcctgctgattctcggacggtgttggagatgttgggtttggatgatgtgcaggttgaggctgtgatgcgtcatcgtgctgagtcttcggatccgttggcggcgctggctggggctatttctcgtcaaactaacgaggtttgataggcgatggcttcgggtgctatgtcgaggcttgctgcgactgagtatcagcgtgaggcggtcaggtttgctgggaagtatgcgggctattatgccgagcttggtcgtttgtggcgtgccggcaggatgagtgacacgcagtatgtgcgtttgtgtgtggagttggagcgtgccggccatgacggttcagcagctatggcagctaaattcgtgcaagattttcgccggttgaacggtgtcgatcctggtttgatcgtgtatgacgagtttgatgctgctgcggctttggctaggtcgttttcgactatgaaggttatgaatagtgacccggatagggcgaatgatactattgatgctatggcggcgggtgttaatcgggctgtcatgaatgctggccgtgacacggttgagtggtctgctggtgcgcagggtaggtcgtggcgtcgggtgactgatggtgatccgtgtgctttttgtgccatgttggctacgaggtcggattatacgactaaggaaagggcgcttactactggtcatactcggcgtcataggcgtggtggtaagcgtccgcttggttcgaagtatcatgataattgtggttgtacggtggttgaggttgttgggcgttgggaaccaaatagggctgatgccgagtatcagcgggtttatgagaaggcccgtgagtgggttgatgatcatgggttgcagcagtcgcctggcaatattttgaaggctatgcgtactgttggcgacatgagatgataggttccggttgtgcaccgccggttatcggtgcacatggttgtctcccgcacgggggccaacaagttagtgttgttttccgcaaggagtgtaaggttaggctatggccgatcagaatgttgaggaacagaatgttgacaatgatgttgttgagtccgaaaaggataatggcattgttgatacagtaaaagacgatggcgggcaggatgtagccgacaatcagttgaagaatgaaggcgagggtaaatcgtcggggactgattggaaggctgaggctcgtaagtgggagtcgcgtgctaaaagtaatttcgccgagttggagaagcttcgtacatcgagtgacgattctggatctactattgatgagcttcgccgcaagaatgaggaactcgaggttaggatcaacgggtttgttcttgagggtgtgaagcgcgaggtggccgccgagtgtggcctgtcgggtgatgctgtcgctttcttgcacggtagcgatcgtgaagcactggtggagtctgctaaggctttgaagggtttgatcgaccagagtggtggtggcgcgggtgtgcgccgtcttgcggggagtgcccccgttgatgatgttaaacgacgtgagggtgtcgcgtttgtggatgctcttgtcaataattctaggagatgatttctgatggctgacgattttctttctgcagggaagcttgagcttcctggttctatgattggtgcggttcgtgaccgtgctatcgattctggtgttttggcgaagctgtcgccggagcagccgactatttttggccctgttaagggtgccgtgtttagtggtgttcctcgtgcgaagattgttggtgagggtgaggttaagccttccgcgtctgttgatgtttcggcgtttactgcgcagcctatcaaggttgtgactcagcagcgtgtctcggacgagtttatgtgggctgatgccgattaccgtctgggtgtgcttcaggatctgatttccccggctcttggtgcttcgattggtcgcgccgtggatctgattgctttccatggtgttgatcctgccactgggaagcctgctgcggctgtcaaggtgtcgctggataagacgaatcatgttgttgatgcaaccgatagcgctacgaccgatcttgttaaggctgtcggtcttatcgctggtgctggtttgcaggttcctaacggtgttgctttggatccggcgttctcgtttgctctgtcgactgaggtgtatccgaaggggtctccgcttgccggtcagccgatgtatcctgccgccggtttcgctggtttggataattggcgcggcctgaatgttggtgcttcttctactgtttctggcgccccggagatgtcgcctgcctcgggtgttaaggctattgttggtgatttctcgcgtgttcattggggtttccagcgtaacttcccgattgaactgatcgagtatggcgacccggatcagactgggcgtgaccttaagggacataacgaggttatggttcgtgccgaggctgtcctgtatgtggctatcgagtcgcttgattcgtttgctgttgtgaaggagaaggctgccccgaagcctaatccgccggccggtaactgattcatttgttgcggtgatgttttctatgtgcagggggtggtgttgatgggtatcattttgaagcctgaggatattgagcctttcgccgatattcctagagagaagcttgaggcgatgattgccgatgtggaggctgtggctgtcagtgtcgccccctgtatcgctaaaccggatttcaaatacaaggatgccgctaaggctattctgcgcagggctttgttgcgctggaatgatactggcgtgtcgggtcaggtgcagtatgagtctgcgggtcctttcgctcagactacacggtctaatactcccacgaatttgttgtggccttctgagattgctgcgttgaagaagttgtgtgagggtgatggtggggctggtaaagcgttcactatcactcccactattaatggtcgatatgtacattctgaggtgtgttccacggtgtggggtgagggttgctcgtgcggatctgatattaacggctacgctggccctttgtgggagatatgatatgaccagttttccttatggtgaaacggttgtgatgcttcaaccgactgttcgtgtcgatgatcttggtgacaaggtggaagactggtctaagcctgtcgagactgtgtaccataacgtggccatctatgcttccgtttcgcaggaggatgaggccgcggggcgtgactcggattatgagcattggtcgatgcttttcaagcagcctgttgtgggtgctgattatcgttgtcggtggcgtattcggggtgttgtgtgggaggctgacgggtctcctatggtgtggcatcatccgatgtctggctgggatgctggtacgcaggttaatgtgaagcgtaagaagggctgatagattgtggctcaggatgtgaatgtgaagctgaacttgccgggtattcgtgaggtgttgaagtcttctggggtgcagtcgatgttggctgagcgtggcgagcgtgtcaagcgtgcagcctcggcgaatgtgggcggtaatgcttttgatagggcccagtatcgtgcagggttgtcgtcggaggtgcaggttcaccgtgttgaggctgtggcccgtattggcaccacatataagggtgggaagcgtattgaggcgaagcatggcacgctggcccggtcgattggggctgcgtcgtgatcgtttacggtgatccgcgtgtgtgggctaaacgtgtgctcaaggatgatggctggctgtctgggataccgtgtacagggacggtgcctgacgatttcagcggtgacctggtctggttggcgttggatggtggcccgcagttgcatgttcgtgagcaggtgtttttgcgggtgaatgtgttttcggatactccggatagggctatgtcgttggcgcgtcgtgttgaggctgtgctggctgatggtgtggacggtgaccctgtggtgtactgtaaacggtctactggccctgatttgctggttgatggtgcacgttttgatgtgtattcgctttttgagcttatatgtaggcctgcggagtctgaataagcttattttttgttttaatgtaattgtttgatatttaatgggggttgtgatggctgcaacacgtaacgcgtctaatgttcgctctgctgttacgggtgacgtctatattggtaaagctcatgccggtgacactattgatggtgtgaagacggttcctgacggtcttaccgctttagggtatctgtcggatgacgggtttaagattaagcctgagcgtaaaacggatgatttgaaggcttggcagaatgcggatgttgttcgcactgtggctacggagtcgtctatcgagatttctttccagctgatcgaatccaagaaagaggttatcgaactgttttggcagtcgaaggttactgccggatccgattcgggttcgttcgatatttctccgggtgccacgacgggtgttcacgccctgttgatggatattgtggatggcgatcaggttattcgctactatttccctgaggttgagcttgtcgatcgtgacgagatcaagggtaagaatggcgaagtgtacgggtatggtgtgacgttgaaggcttaccctgcccagattaaccataagggtgatgcggtgtctggtcgggggtggatgacggctttaaaagctgatactcccccggttcctccttctccgaagccagagactcctaagccgcctaagcctgagccggatcctaatccgccggccggtaactgatacactattttagggattgttgatagatgagtgacacaggttacacgttgaagattggtgaccgtagctgggtgttggcggatgcggaggagacggcgcaggctgttcctgcccgcgtttttcgtcgtgccgccaggattgcccagtcgggggagtctgcggatttcgcccaggttgaggtgatgttttctatgttggaggctgccgccccagcggatgcggtggaggccctggaggggcttcctatggttcgtgtggcggaggttttccgtgagtggatggaatacaagcctgacggtaagggtgcctcgctgggggaatagtttggctccacggcctgattgatgattatcgtggggccatcgaatacgatttccgcaccaagtttggtgtttctgtttatagtgttggtggcccgcagatgtgttggggtgaggctgtccggctggctggcgtgttgtgtaccgatacgtctagccagttggcggcccacctgaatggttggcagcgcccgtttgagtggtgtgagtgggctgtgttggacatgttggatcattacaggtctgctaatagtgaggggcagccggagcctgtggcgaggcctacggatgagcgtagggcccggtttacctctgggcaggtggacgatattttggcgcgtgttcgtgccggtggcggggtgtctcgcgagattgatattatggggtgaatagtgtatgtctggtgagattgcttccgcatatgtgtcgttgtatacgaagatgcctggccttaaaagtgatgttggtaaacagttgtcgggtgtgatgcctgctgagggtcagcgttcgggtagcttgtttgctggcgggatgaagttggcgcttggtggtgcggcgatgatgggtgccatcaatgttgctaagaagggcctcaagtctatctatgatgtgactattggtggcggtatagctagggcgatggctattgatgaggctcaggctaaactgactggtttgggtcatacgtcgtctgacacgtcttcgattatgaattcggctattgaggctgtgactggtacgtcgtatgcgttgggtgatgcggcgtctacggctgcggcgttgtctgcttcgggtgtgaagtctggcgggcagatgacggatgtgttgaagactgtcgccgatgtgtcttatatttcgggtaagtcgtttcaggatacgggcgctatttttacgtcggttatggcgcgcggtaagttgcagggcgatgacatgttgcagcttacgatggcgggtgttcctgtgctgtctctgttggctaggcagactggtaaaacgtctgctgaggtgtcgcagatggtgtcgaaggggcagattgattttaacacgtttgcggctgcgatgaagcttggcatgggtggtgctgcgcaggcgtctggtaagacgtttgagggcgctatgaagaatgttaagagcgccctgggttatttgggtgctacggctatggccccgtttttgaacggcctgcggcagatttttgttgcgttgaatccggttattaagtctatcacggagtctgtgaagcctttgtttgcgtcggtggatcaggggattcagcggatgatgccgtctattttggcgtggattaaccgtatgccggctatgatcactcgaatgaatgcacagatgcgcgccaaggcggagcagttgaagggcatttttgcgaggctgcatttgcctgttcctaaggtgaatttgggtgccatgtttgctggcggcaccgcagtgttcggtattgttgctgcgggtgttgggaagcttgttgcggggtttgccccgttggctgtgtcgttgaagaatctgttgccgtcgtttggtgctttgaggggtgccgctggggggcttggcggcgtgtttcgcgccctgggtggccctgtcggtattgtgatcggcttgtttgctgccatgtttgctacgaacgcccagttccgtgccgctgtgatgcagcttgtgggggttgttggccgggctttggggcagattatggtcgccttgcagccactgttcggtattgttgctggcgtggttgccaggttggcgccagtgttcggccagattatcggtatggttgctggtttggctgcccgactggtgcctgttattggtatgcttattgcccggctggtgcctgttatcacccagattattggtatggtaacccaggttgctgcaatgttgttgcctatgctgatgccggttattcaggctgttgttgctgtgatacggcaggttattggcgtggtcatgcagttgatacctgttttgatgccggttgtgcagcagattttgggtgctgtcatgtctgttttgccgccgattgttggtttgatacggtcgctgataccggtgatcatgtcgattatgcgtgtggtggtgcaggttgttggcgccgtgctacaggtggtggcccgtattattccggttattatgccgatttatgtttcggtgattggattcattgccaagatttatgctgcggttatcgtttttgaggctaaggttattggcgctattcttcgtactattacgtggattgtgaatcattcagtgtctggcgtgaggtctatgggtacggccatccagaatggctggaatcatatcaaatcgtttacgtctgcgtttatgaacggttttaagtcgatcatttctggcggtgttgccgcggttgtggggttttttacgcggcttggtttgtcggttgcctcccatgtgaggtctggttttaacgcggctcgtggcgctgtttcggctgcgatgaacgggattcggagtgttgtgtcttcggtggcgtctgctgttggcgggtttttcagttcgatggcgtctcgtgttcggaatggtgctgtgcgcgggtttaatggtgcccggagtgcggcatcttccgctatgcatgctatggggtccgctgtgtctagtggtgtgcatggtgtgctgggttttttccggaatttgcctggcaatattaggggcgccttgggtagtatgggctccctgttggtgtctgctggccgcgatgtggtggccggtttgggtaacggtatcaagaatgctatgagtggcctgctggatacggtgcgtaatatgggttctcaggttgctaatgctgcgaagtcggtgttgggtattcattccccgtcgagggtgtttcgtgaccaggttggccggcaggttgttgccggtttggctgagggtattactggtaatgctggtttggcgttggatgcgatgtcgggtgtggctggtcggctgcctgatgcggttgatgcccggtttggtgtgagatcgtctgtgggctcgtttaccccgtatggcaggtatcagcgtgcgagcgagaagagtgttgtggtgaatgtgaatgggcctacgtatggtgatcctaacgagtttgcgaagcggattgagcggcagcagcgtgacgctttgaacgcgttggcttacgtgtgattgggggtgtggttcatgtttcttcctgacccgtctgatcgttctggtttgactgttacctggtctatgttgccgttgattggtaatgatccggagcgtgtgcttcatttgacggattatacggggtcgtctcctgtcatgttgttgaatgattcgttgcgcggtttgggtgtgcccgaggtggagcatttttctcaaactcatgttggggtgcacggctcggagtggcgcgggtttaatgtgaagcctcgcgaggtgacgctacctgtcctggtgtcgggtgttgagccggatcctgatggcgggtttcgtgacggttttttgaaagcctatgacgcgttgtggtctgcttttcctcccggggaggagggtgaactgtcggtgaagactcctgccggtgttgagcgtgtgctgcggtgtcggtttgattctgtggatgacacttttacggttgatccggtgaacaggggttatgcgcgttatctgttgcatttgacggcttatgacccgttttggtatggggatgagcaaaagtttcgtttcagtaacgcgaagttgcaggattggctgggtggcggccctgtcggcaagaagggtacagcgtttcctgtggtgttgacgcctggtgttggttctggctgggataatttgtcgaataagggtgatgtgcctgcgtggcctgtgattcgtgttgaggggcctttggagtcgtggtctgtgcagattgatggtttgcgtgtgtcttcggattggcctgtcgaggagtatgattggatcactattgatacggatcctcgtaagcagtctgctttgttgaatggttttgaggatgtgatggatcgtctgtctgagtgggagtttgcgcctatcccgcctggcggttctaagagtttgaatattgagatggttggtttgggtgccattgttgtgtcggtgcagtacaggtttttgagggcttggtgaatagttgatggctggtcttgttccgcatgtaacattgtttacgccggattatcgccgtgtggcgcctatcaatttttttgagtcgttgaagttgtcgttgaagtggaatggtttgtccactttggagttggtggtgtctggggatcattctaggcttgacgtgttgactaggccgggtgcacggctggttgttgattatggtggtggccagattttttctgggcctgtgcgtaaggttcatggtgtgggtccttggcgttcttcgcgggtgacgatcacgtgtgaggatgatattcgcctgttgtggcgtatgttgatgtggcctgtgaattatcgtcctggtatggttggtatggagtggcgtgccgacagggattatgcccactattctggtgctgcggagtcggttgctaagcaggtgttgggggataatgcttggcgttttccgcctggtttgtttatgaacgatgatgagagtcgtggccgctatattaaggattttcaggtgcggttccacttgttttccgataaactgttgccggtgttgtcgtgggctcggatgactgtcacggtgaaccagtttgagaatgcgaagtttgatcagcgtggtttggtgtttgattgtgtgccggctgtgacccggaaacatgtgttgactgccgagtctggttcgattgtgtcgtgggagtatgtgcgtgacgcccctaaggctacgtctgtggtggttggtggccgcggcgagggcaaagacaggctgttttgtgaggatgttgattcgatggccgaggatgactggtttgatcgtgtcgaggtgtttaaggatgcccgtaacacggattctgaacatgtgcatcttattgatgaggctgagcaggtgttgtccgagttgggggctacgtcggggtttaagatcgagttggcggagtcggatgtgttgcggtttgggccaggcaatctgatgcctggggatttgatctatgtggatgtaggctcgggccctatcgcggagattgttcggcagattgatgtggagtgtgattcgccgggtgatggttggacgaaggtgacacctgttgcgggggattatgaggataatccgtcggcgttgttggctcgccgtgtggctggtttggctgcgggtgtgcgggatttgcaaaaattctaattgttaggggtttgttgtgggtattgtgtgtaaagggtttgatggtgtgttgaccgagtatgattgggctcaaatgtcgggtctgatgggtaatatgccgtccgtgaaagggccggacgattttcgtgtcggcacgacgattcagggtgccacagtgttgtgtgaggtcctgccggggcaggcttgggctcatggggtgatgtgcacgtcgaatagtgttgagacggtgacagggcagctgcctggccctggtgagacccggtacgactatgttgttctgtcgcgggattgggagcagaacacagccaagttggagattgttcccggtgggcgtgcggagcgtgcccgtgacgtgttgcgtgccgagcctggcgtgtaccatcagcagctactggctactttggtgttgtcgtctaacgggttgcagcagcagcttgacaggcgtgctatagcggcccgtgtggcgtttggggagtctgctgcgtgtgacccgacccctgtggagggtgaccgggtgatggttccttcgggggctgtgtgggctaaccatgccggcgagtggatgttgttgtctccgcgtatcgaaacgggttctaagtcgatcatgtttggtggttctgctgtgtatgcttacacgattccgtttgatcgccagttcagtagtccgcctgttgtggtggcgtctatggctacggcggctgggggcacgcagcagatcgatgtgaaagcctacaatgtgactgcccaaaattttagtttggcgtttattacgaatgatggttcgaagccgaatggtgtgcctgcggtggctaattggattgctgtcggcgtgtgactgtacaggtgttgtggcggatggtgtgatattggggggctgtggtgtcgtggtttactcctgcactggtggcctctatttgtaccgcgttggccacggttttgggttctgttcaggcggtcacatcccgttctaggcggcgtttacgcaggctgtctgcgcaggtggatgctttggaggagtatgcgtggggtgtgcggcgtgaggttcgccggtttaactcgcggcttcctgacgaggtggagcctatgcgtcttcctgatgtgcccgagtttttgaaggatactgttgatggtggtggggggtgaattgtgagggagttggaggaggagaagcggcagcgccgctcgtttgagaaggcttcacttatattgttgttcttgtcgcttgtgttgttggcggtggttgctgcgggtgctttacgtttcggggctgtatcctctgagcgggattcggagcaggctaaagcccagtctaatggtacagccgctaaaggtttagccagccgtgtgaagcaggtgtgtacccagggtggcgtggagtctgcgcggcttcaccagtctggcttgtgtgtggatgctcagcgtgttgagcgtagcgtgcagggtgttcctggcccggctggtgagcgcggcgaggtgggcccttcgggtcctgccggcccgcaaggcgcacagggggagcgtggtgagcgtggccccgcaggtgtgaacggatccgacggtaaagacggtaaggatggcgctgatggccgtgatgggcgttcggtgatatcggtgtactgttccgggggccgcctggttgtgaaatatagtgacggtacggcctctaccgtgtcgggttctgtggcttgtgagagtgtgaaaccgtcacctgtggttaccgtatcatcccataggtgaacaagaagagggaagggtgttactagtgttgattgtggtgtttgggggtggtgtgtggtgagatacattccagcggcgcatcactctgccggttcgaatagtccggtgaacagggttgtgattcatgcaacatgcccggatgttgggtttccgtccgcctcccgtaagggtcgggcagtgtccacggcaaactattttgcttccccatcatcgggtggttcggcgcattatgtgtgtgatattggggagactgtgcaatgcctgtccgagtctacgattggttggcatgccccgccgaatccgcattctttgggtatagagatttgtgcggatgggggttcgcacgcctcgttccgtgtgccaggacatgcttacactcgtgagcagtggcttgatccgcaggtgtggcccgcggtggagagggcggcggtgctgtgccggcagttgtgtgacaagcatggtgttccgaaaaggaaactgtcggctgccgatttgaaggccggtaaacgtggtgtttgcgggcatgtggatgttacggatgcgtggcatcagtcggatcatgatgatccggggccgtggtttccgtgggacaaatttatggctgtggtgaatggccacggcggcggttcaagtagtgaggagttgagtatggctgatgtacaagcgttacataatcagattaaacagttgtcggcacaggtggcccagtcggtgaataagctgcatcacgatgttggtgtggttcaggtacagaatggtgatttgggtaaacgtgttgatgccctgtcgtgggtgaagaatccggtgacggggaagctgtggcgcaccaaggatgctttgtggagtgtctggtattacgtgctggagtgtcgcagccgcatagacaggctcgagtctgctgtcaacgatttgaaaaagtgatggtggtttgttgtgggtaaacagttttggttaggtgtgctggagcgggcgttaaagacttttgttcaaacgtttgtggctgtgttgggggtgacggcgggtgtcacgtatactgcggagtcgtttcgcggtttgccatgggagtctgccctgattacggccacggttgctgcggtcctgtcggtggctacctcgtttggtagcccgtcgtttgtggccggcaaacctaaaaccatggttgtggatgctgggcttgttccacccgacgatgggggcatggttgagccgcactcggtggatgtgtcggatcctggcatgatcgagcctgcagatgatgtggatcttggtgtaggctatgagcctcggcgtgcagccgagtcggaggttggcacagtagagtctactgttgcataagtgaatatagatgtgtgccccagcggtgctgccacgattgtgtggtggttgccgctggggcactatttttgtatattgcggtgtggctatgattcgttgctgtcgatggtgtcttcgagcatctgatacaggtggaggcaggtagagatcgtttcgctggcctggtcgagaacgttccggccgataacgtttttgtggttgtcgcggtggcggatgatagcccacatgatctcgtcggctgccgcctgtaatagtttggcctggtatgcgattccggcgagccagtctagtgcttcctggcttgcataggggctctggttctcgctgttgccgcgggtgttgctgttgtttgtggggtgtcctgcactgtcgcagaaccataggatttcgctgcactcgtctagcgtgtcttggtcgatagcgagatcgtcgaggctgacattgttgacggtaaggttcacgttgtcgagggagatgggtacaccgtactggttttcgacactgtcaacaatgttttgtagttgttgcatgttggtgggctgttgttggacgatgcggtgtatcgctgtgttgagggtggtgtaggtgatgttgtgtgtgttgtccatcgtgttatgccattccttcgttatcgtctggcatgtagtatgtgctgtttgcgtactcggttaacgtcatcagtgtttggtctgcccactgtttcacggtttgccgggtgacacctaatcgttgggcggctgtggcgtaggtttggtcgtatccgtagacttcccggaatgctgccagcctagctaaatgttttcgctgtttggatggttcacaggtgagtgtgtagtcgtcgatagcgagctgtagatcgatcatggtgacgatgttgttgccgtgatgctggggggcggttggtgggggtggcattcctggttcgacggatggtttccatggtccgccgttccagatccattgggcggcttggatgatgtcggcggtggtgtaggttcggctcacttggtcaccccctgaacatgttgtcgaggttgttggtgttgctggtgtcgaatcgtccgacgcagtggcagtagtcgtacatgagtttgatgatgtgttggtggtcgccgaggtaggtgtttccgctgatgctgtaggtggctgtgccgtctttgctgatggtgtatttggcggtgatggtttcgggtgtttctgtgttggtgatgatggctgtggtggtggcgcctacggtttgtagcctggtggtttgggttccgtcgtcgaggatggttgtgaccatggtgtgtgttctccttttaaatgctggtttggttgtcggctatggacgtgatttcgtgtaccggtttgggtaggtctaggtgttgtatggttttgttggctagccgtttggctaccctgtaacacattttggtgtagtgtttgttgtctaggttgtggtattgttcccgcaccgcaatatatagtagggagtcttggtacaggtcgtctgcactgattgcggggtagtgtccggctgttttggtgcatgcccggttgagtgtgcgtagatgatggtttgtggcccatccccacgatgcggtggtggccaggtctgcttttgttggtcgtctgctcatagcatctcttttatctggctatctgatagttgtttggtgttttgttgtggatagtgtagcacactagtccggggtggccggtggtgcctgtacggtgccggaaccatgtggattcgccttccatggatgggcattggatgaaggtgcgttgtccttgctcggatatttctaggtggtgtcggtggcctgccatgagtatgtgtgatgtggtgccgttgtggaattcttggccgcgccaccattcgtattgtttgccggtgcgccattggtgcccgtgggcgtgcaggatttgtgtgcctgccacgtctacggtggtggtcatttcgtctcggctggggaagtggaagtgtaggttggggtattggttgttgagctggtaggcttctgcgatggcgcggcagcagtctacgtcgaatgagtcgtcgtaggtggtgactcctttgccgaatcgtacggcttctccgtggttgcctgggatggatgtgatggtgacgttggcgcagtggtcgaacatgtggacgagttgcatcatggccatgcgggtgagcctgatttgttcggtgaggggtgtttgtgtgcgccaggcgttgttgccgccttgtgacacgtatccttcgatcatgtcgccgaggaatgcgatgtggactcgttgcggtttgcctgcttgctgccagtagtgttttgcgactatgagggagtgtaaatagttgtcggcgaagtgtgctgtttctcctccggggatgcctttgccgatttggaagtctcctgccccgatgacgaaggctgcagtgctgtagtcggtgtgggtgttctgttcgggtttggggggtgtccattcggctagtttgttgacgagttcgtctaccgggtaggggtttgttgcgggttggtggtcgatgattttttgtatggatcggcctgtttctccgttggggagtgtccattcggagatgcgtgtgcggcgtacagtaccattggctagattgtcgtcgatggtgtcgatggcgttgtcgtggttggctagctgtgtgagtagccggtctatattgtctatcactggttttcctcttctgttgtctgggtggtgttggcttgtttgcggcgatagtctttgatgacggtggcggagatggggtatcctgcctgggtgagctgttttgctagccatgaggcggggatagacctgtcggcgaggacgtctgcagctttgttgccgtagcgttggatgagggtttcagttttggttgccatgatgtcctatcggttgtgtggtgggttgccatcctgtgcggcagtcgccgtcgtgtcctggcttgcgtgtgcaccacgatacggttccgtctgtgtggttgagtgtttttccgcacatgacgttttgtagatgttccggcagctggtcggtgttgctatcgtcttgctcgtctagcaaagttttttgttgggtgaaaaactcggacacggtgccgttgtggactggtagtatccatgttttccattgttgttgtagccgagtgttccagtggaattgtttggccgcgttttcggcttgtttgatggttttgtagtagcctacaatgatccgctggtggttgttgtctggcttgtgtggccctttccagtattgggcggctacagcgtacctgttgttgtcggtgaagcgctgccagcagtactcgatgatgtgctgtagtacactatcgggaatgtcttgtgcttggttttcgtcgagccactcgtcgacaataatgttgcgtatggctcgcttgtctttggtggtgggtttgaacgagatgctcacagtacgggcctgtcgtcttgcatgaactggttgaaggtgctgttcccggcgtgttgggcttgtgtgatttgctggtcggtccagtctgggtgttgctgtttcagatagtgccagtggcaggcgttgtaggtttcgttttgtagccgtgtgagatggttttcggtgatgatttgtttccacattttccacgagacgtcgagtcgtttgagcatgtcgatggccggcacattaaacgagtcaaggaagagtatttcgtgggtgtagtagtttttctcgtaggcgtcccatccgcttcggtgcctgttgggctggtttttggggtagacttcccggcatactttgtgtaaccgtttggccatgtctttgggtagtttaatgtcggggttggcgcggatcatggatcgcatcccatcgtaggtggtgccccaggtgtgcatgatgtgtagtgggtcttcaccatcagcccatttttctgcacagatggcgaggcggatacgcctcctggctgtttggctggtgttgcggcggtgggggatggggcacgtgtcgaggggatccatgatgttttggtgtacctttcttggtttgggttgcttgcgtggttttactgtagcacagtgtctagtgcttgtgtcaaccctgtttttccggcctgtaggtaggtgtctgtgacgtcaccgagggtgaggggcacatgggtggcttgggggagtgccgcctggagggtttgggccatctggtctcctgctttgtctgggtcggaccatatgtagatgtggtcgtagccttcaaaaaatttggtccaaaagttttgccacgaggtggctccgggtagggcgacggccgaccatccgcattgttcgaggatcatggagtcgaattcgccttcgcagatgtgtatttcggctgccgggttggccatggcggccatgttgtagatggagcctgtgtccccggctggggttaggtatttggggtggttgtgggttttgcagtcgtgcgggagtgagcagcggaaacgcatttttcgtatttcggctgggccgccccaaacggggtacatgtatgggatggtgatgcactggttgtagttttcgtggccgggtatggggtcattgtcgatgtatccaaggtggtggtagcgggctgtttcttcgctgatgcctcttgctgagagcaggtcgagtatgttttcgaggtgggtttcgtagagggccgaggctttctggattcggcggcgttccgcaatgttgtatgggcgtatgctgtcgtacattcgggttttcttcttctaatcgttgttgtagtttggtgagtccgcctccgacaccgcatgtgtggcagtaccagacgcccttgtcgaggttgatgctcatggagggctggtggtcgtcgtggaacgggcagaggatgtgttgctcgtttttggacgggttgtagcggatgcggtaggtgtcgaggaggtggcaggtgtcagaggtgtgggaggagctcgttgagggttgataccacataggcttcgctccagggtttgttgcgctgtttcatgatgactaggccgatggtggattggtttttgcggtttcggtgggtttcgtagttgcgcgcctcaagggtggcttctttcacgaattgggctaggtgtggttgcccggctttcgcctcgataatgtaggttttgttgccggttttgaggatgaggtcgccttcgtcttcccttccgttgaggtggaggcgctctatatcatagccggtgtcgcgtagttggtggaggagtcttgtttcccattcggctccggccctgcggttgcgtgattgttgtgtcgccatcatagtcctttgtgtgttgtggtcatgttccagggctgtttttcgacgaggggtccgaagaatgtgtattcggggtaggctcgtagccgctcatattttgttccgtctgggctggatcgcccggtgcgctgtttgagcacggcgatgcgagcctctgccggtatcgataggccgttgccattatcctcgccaccatacaatgatactccgagaatgagttgtggtttttcggagagtccgtttttgatttcccggcgtgctggcgggtgttcgatgtcggagccggttttgtcggttgcgtggtgtgtgacaataatggtggagccggtgtctctgcctagtgctgtgatccattgcatggcttcttgttgggcttggtagtcggattcgcagtcttggatgtccatcaggttgtcgataacaatgagtggtgggaaggtgttccacatttccatgtaggcttgtagttccatggtgatgtcggtccaggtgatgggtgactggaatgagaatgtgatgtgttggccgtggtggatgctgtctcgatagtattctggcccgtagtcgtcgatgttttgttgtatttgggcggtggtgtgttgggtgttgagggagatgattcgtgtggaggcctcccagggtgtcatgtcccctgatatgtagagggctggctggttgagcatggcggtgatgaacatggctagcccggatttttggctgccggagcgccccgcgatcatgactaggtcccctttgtggatgtgcatgtcctggttgcggtagaggggttctagctggggtatgcggggcagctcggcggcggtttgggaggctctctcgaaggatcgttgtagagagagcatcggagccttaatctatctgtctatcggttggatgatgtgttggtggtcagatggagtcgatgtcgatatcagcatcagttgaggctgtggtgtcgtctagctggctgttatcgcgtttgtctacgtattcggcaaccttatcatagatggcatcatcaaggggtttgagcacgaccgcgttgaacccgtttttggtgcgcacggtggcgagtttgaaggcctgttcttcgccgagatatgcttctaggtcgcggatcatggagtgtgggcggtcgttgttgccgcgtgctttctcaataatagcgttggggatggtttctggggtgccgttgttgagatcgtctagggtgtggaagattgtgacatcggcgtagatgcggtctgcgacctgtccgccgtagccttcggtgttgtgttctacgtcgcggattttgaaggcgatggcggtggcgtcctggtttcgggaggggttgaagaaggtgctgttgctgttgtggttgcggtagttggcgagtcccatgattgttgtttcctttactgttgtgtctgtttttgttgtcttatattggtttatcgggtgaggctgtttcgtttgctgcggaacgcctcggacacgtcagggttgctggtgatggtctttttgtactgtttgaggaggtcggctagctgtgctttgctggtggctttgttgatccggtcaatgatgatgtcgttttcctgattggcgattttgtttacgtagtctttggcggcctgattgtatcggtcttggaggatgatggatgcgctcgctacgagtgttgcaaggtcccagtctttcgatacggtttcgtctttcaatcctcctagcaggtcgatgatagttttctttacctggtcggcggtgtctccgcggatgacggtccatggggcggcgtagtcgcctccgtatttgagggtgacggtgaatcggtcgtcgtctgcgttgtcggtcactggtgctccttgccttcttctgttggggctgtgatggtggtttctaccgggtacctgtaggcgtctttcccgttgacagcccagcaggcgtccttgacggggcagcctttgcagagtgctgtgacgtgtgggacgaagatgccttcgctgattcctttcattgcttgactatacatggatgatacatgccggtaggtgttgttgtcaaggtcatagagttcggtggatgtgccttgtgtcggggacttgtcgtcgttgcggctggtggctggcgtccaaaaaatgccttttgtcacattgttgccgtgttggttgagcatgtaccggtatgtgtgcaactgcatactgtcggcgggtaggcgtccggttttgaggtcgaggatgaaggtttcgccggtgtcggtgtcggtgaagatacggtcaatatatccgacaatagtggtgccatcctggagggtggtttctaccgggtattcgatgcctggctggccgtcaataacagcggtgatgtattctgggtggttgcgcctccagtttttccacctgtccacaaaggtggggccgtatatcatccaccaattgtagtcttttttgtgtggcccgcccgactcgcacatgtttttgcacaccctgccggagggtttgatttctgtgccttcggattcggcgagggcgacttgggtgtcgaaaatgtttttgaaggatgagagtttgtctggcagtgcagggtattcggcgggattgtacaggtgtaggtcgtattgttcggtgatgtggtgtatggcgcttccggcgatggtggcataccaggtgtggtgttgggcgtggtagccgtgttggaggcgccatttttctccgcattcggcccactgggtgagtgaactgtaggagatgtggcctggatggtggatggttttcgggtattgtgctaggggcattacttgtcgcttttgttccatgggttgcgggtgtcttggccggcctggtgttgctggtaggcgaggagtgctaggcagtgccaggcagcatgggccaggtggggtagcccggattcatcatcgaggttgtttccttgctgccatgataacaggtgccggtagagggcgtcgacactgtggctccacgggtagccgccggtccagttgttgtcgccgtatttggtggcaccgtagcctgccacggagccgagggcgtgcaaggctgcggggtcgatgagggagagcctgcaaagtttgagttcttttttggcaccggtgttggggtcggtgtacatgctggttggttcatccatggtgtgtgtgctccttgagtgtgggttactggttggggttgtgggctagggctacggcgaggatgatgatggcgagggtttcagcaataagtatgggtgttgtgatcatttagtgtctcggggattgttggtgagtgtggaggcgcctaggagggtggtgagggcgcatgcggcaataatggcgagggctgccttgtgtggggtgccggttgcgtacatccatgtgatgatggcgccctgtatccatgccagtgtggtgaagaacgtttcgtagctgtgtagctcaatgttgttgggtgtgttcatgcttgctcctgaagaatggtgttgatggttttataaatgttgtacaggttggtttcgatagataacagttggtggatttcgtggtcgagatcaatgtctgggttgagggtgttgatgcgggaggcaatatcggtggctgtgcgtagtgtgccgccggtgtggtgaatgatgtgtgccgtgtcggcgagtccggtggtgacagcgtagtgggagaggagaggcatagcggggatgctccttggcgggttactgttgcgggttgatgttgaggtctgtgacgtgcgggtggtcttctgttccggtgacgaggcagtggactgtgacgggtagtttggatgctcccggctggcggacggtggcgccgtagacgatggagaaggtgtctttaccaataattttgtggagttggaggtcgatgtcggggttgccgttccatttgacaccgtgtgcggcggcttgctgttcggctttgcggttgcaggtgtgtgctgccgtgatcatggtgagtccggtggcggtttcttcaccccttgcttgggcctgcttgtgggctttggcctgctcggctcgcagtgactgttctgcggcggcctgccgggctttcttttcggctttgcgctgttggacggttttgggggtccattcggtgttggctgtggtggcctgtggggctggctgtgaggcgagtggcggattgtcgtctggggctggcatgaatgaggcggcggcaatgatggcggctgtgatgcctgcgatggtgtagccgtttttcttgttcatgttttgtgtcccctttccggggtgttgttcgttgctgacatgattaatactttcagcggctgggccctgtgtcaaggctgcgctcagtttgtgtgagcgatacttgtgtggctaggggtgatggcttctttcgcccaataggatgtgccaccgctggtccagtatccgagtttgttgcgctgcatgcccttggcgtccatctcatccacggtgaggcacctgcggcgattggggccttccttgaccccgtgatcgcctacccgatgcatgtcgcctgaggtggtactcgtgaatgtttcgtggcagattgtgcagtgctctgacttgtatccgatgattgtgctatcgcacttgtggcatgtccattgcatgattgctcctattttccattataagactccctgtagtgccattttagcgccttgcgggtcttgggggtacaactatataggtcaggtatttctaagcgtttctaggcgattctaggctcattgtgtgcgactgaggtttatcgggcacacagggtgagcaggtggccaacattgatgcgggtcacattccagtagagttgcgtggcttcaccgccggtgagtggcttccactcatcatggctgaacacggtgccatcggtggcgatgaatgtgttggggcgtagcttgtggagttcaatctctacgctctgccggtaggcttcggcgaggcccccgaaatcgaggtggtcgcaggggaggttttcgaggcgtgtcaggtcgaagggtgtggggcagtcgtagctggcggggctgtagagctgggtgaagtggttggcgatcttctgcatcatgattccttttctggtgatggtgtgttgatggttttatcgtgtggattcggcgatgatagcgtcgaggtcgatcatgtcgatcatgtcgtggagttcctcagtctcatctggggtgagtggctgccagttgcgtggcccatacactgcaccgtcaagagtgatggtccacaggggccggatgagtcgtacggcttcttcgactttggcacggtataggcggcagatgatagacgtgtgggtgttacctatgtcacatcctgccaggtgtgcgggatggagtggattgatttctgtttgcccgtagaggctggtgaaggatggtgtgatgagtgtgccatccatgggtgatgttcctttctgggctgtctgggttggttgttgtggtttctagagtgtgtgggctgtgacctatagtcaaggctacgctcattcggattgagcgtttcatgtgggtgtggcatggaatctacacccccatactatgtgagataggccacatcctcctggcttggtgtgccatctcaaggccaccctgccaatctggcgtggagggtgtagcccagaaataccgtttaaagccttcacacggcgcctaggagcaccttacagggtgggggctaggtattcatacccccaagcaattctgatcgattctagacgcctacaggagcctcatacacgatcaaccatctcggcatagatcatcagcccctatcctgcttagctaagcctatactatgtggacagtgtgggatactgtagggggaagaaggacacggtaaaagaaagaagggggagcatcagccttcacaccttaaagtcttagcgcttagcaccgatggtcttagcagttagcaccgagcccctcaagggctcggcatcagcccgaacaggcacagccctgaaaggagtacacgccatcagggaaggcttgagagtacgaggagccctagcgacgagtactcgaaagcctgagggaacaccctcagcactgatgggcctagcgtgttcggaaaggacacaagagtcaaacgtgacagctatccgggagtgaaacccgttctgactaggggtttcagccttaaccacctgtaaaggttacaagactctaagaaaatttaaggaaaagtttaggtttaatttttggacctttactaccaaaaacacccgtttacacccctcaaacccgcctatagagccaaatccaccggtttgactcatcccaggtggggtatgataggctggacaggtagccagctggacgcaaggccagaaagtgctgacgcacttcccgacctcgcttaccatcagtctaccaaacacttaaagaccttaaggcttagcgctaagcccttaagaccttaacgcttagcaccgagccccctcaagggctcggcatcagccctaaggctttaacacttaaataaacatataaaccttaaaagctaagttaacatttaagtcttacacacttagcgctgagccctccaaggctcagcatcagtcttaggtacttaaggatctaagttactataaaagttttaaagtcttaaagtaactatataaccttaacagttaagttaactataaaaccttaaaggctaagcacttaaggttataaacttaacatcagtgtttaagacttaaagagttaaacacttaaagtaactataagactttaaaaacctcaagtcttaaagttaaccatcagtcttaaactttaatattataacctataagtcttaaagcttataagttataaaagttttagaagagctaaggggttaacttctttacttctcttctctctttggttctttctctcttctcttcttttcttcatcaggggagaagaggaaccttttgccgtcagcgctgatgggcttttcaccgtgtgactcgtgtgcttctggtcgcaagctcccatcgcgcactccccacactctgacacctgtgtccctttcaggcttggcgtgttcggctgaaggcgtacggcgtgtcatgctcacacccttaacaccgggtgagacttaaagtgtatattatatgtagaagactttaaaacctgtaaggtgttcccgctgagcccgtgtcctacaccgccaagcgctaagccttgaaacgcgaacacacacccaccccccttttttctttcgtgtccttctcttttgacacagctggggggtgatgtgatctttctcacatgtcaggggggtagtggagaaaacaaacaccccaccacaaacagaacacccctcaaacacacaaaacagggcctaggatcgatcagcagggcaagggcaaggtattcatacccccagacgattccaggccgttacaggggcaaataagacccgtacagggctaggcgaggaacagacacatcatggcacgcaccaaccgtacagccagccaagcccaccggcgctggcgggcaagactcatcacccaagcccgacagcaaggccaaaccgaatgcccactctgcggagcccagatagcctgggacacacatgacctgccaaccagccccgaagccgaccacatcacacccgtcagtaggggaggactcaacaccctcgacaacgggcaaatcatctgcagaacatgcaacagaagcaaaggcaatcgcagcgaaccaaacatcaagttccaacaacaaaccacaaaaaaccttgttccatggtgacaaacccgccaacccccaccggggacaccccctgcacacccgtgcaagacc

SEQ ID NO: 35 - DNA, 29266 bp, Bacteriophage of P. acnes
agtgaaatacctcccttttgtggatttgtctgtttgtcgattttttgtgttggtggtgagtgttgtgcagcctgagcttcctgatagtcgtgattggtgtggggagacgcgtcgttggtggcgtgtgtggggtgaggatccgcgtgccgggtttgtgtctgatgaggagtggttgtttctcatggatgctgcggtgttgcatgatgtggtgtggcgtgagggcagggcggaccttgtggcttcgctgcgtgctcatgtgaaggcgtttatgggcatgttggatcgttattcggttgatgtggcgtctggtggccgtggtgggggttctgcggtggcgatgattgaccggtataggaagcgtaggggggcctgagtaggtgtctggtgttgttgggtctcaggttcctcgtcatcgtgtggctgcggcgtattcggtgtctgctggcggtgatgctggggagttgggtcgtgcgtatgggttgacgcctgatccgtggcagcagcaggtgttggatgattggcttgctgtgggtggtaatggcaggcttgcttcgggtgtgtgtggtgtgtttgtgcctcgccagaatggcaagaatgctattttggagattgtggagttgtttaaggcgactattcagggtcgccgtattttgcatacggctcacgagttgaagtcggctcgtaaggcgtttatgcggttgaggtcgttttttgagaatgagcggcagtttcctgacttgtatcgtatggtgaagtcgattcgggcgacgaatggtcaggaggctattgtgttgcatcatccggattgtgccacgtttgagcgtaagtgtggttgtccgggttggggttcggttgagtttgtggcccgcagtcggggttctgctcgcgggtttacggttgatgatttggtgtgtgatgaggctcaggagttgtcggatgagcagttggaggctttgcttcctacggtgagtgctgccccgtctggtgatccgcagcagatttttcttggcacgccgcctgggccgttggcggacggtagcgtagtgttgcgtttgcgtgggcaggctttgtcgggtggtaaaaggtttgcgtggacggagttttcgattcctgacgagtctgatccggatgatgtgtcgcggcagtggcggaagttggcgggtgacactaatccggcgttgggtcgtcgtctgaattttgggaccgtaagtgatgagcatgagtcgatgtctgctgccgggtttgctcgggagcggcttggctggtgggatcgtggccagtcggctacgtctgttgttccggcggataagtgggctcagtctgctgtggatgaggcgagtctggttggcgggaaagtgtttggtgtctcgttttctcgttctggggatcgggttgctttggcgggtgccggccggactgatgctggggttcatgttgaggttattgatgggctgtcgggaacgattgttgatggtgtgggccggttggctgactggttggcggttcgttggggtgatactgaccggatcatggttgccgggtctggtgcggtgttgttgcagaaggcgttgacggatcgtggtattccgggccgtggcgtgatggttgccgatactggcacctatgtggaggcgtgtcaggcgtttcttgagggtgttcgttcgggtgttgtgtctcatcctcgtgctgattctcgccgtgacatgttggatattgctgtgaggtcggctgtgcagaagaagaaaggctctgcgtggggttggggttcctcgtttaaggatggttctgaggttcctttggaggctgtgtcgttggcgtttttgggggctaaacgtgttcgtcgtggctgtcgggagcgtagtggtaggaagcgggtgtctgtggtatgaacgtggacgagttggctctgattgagggcatgtacgatcgtatccaaaggttgtcttcgtggcattgccgtattgagggctactatgagggctctaatcgggtgcgtgatttgggggtggctattcctccggagttgcagcgtgtgcagacggtggtgtcgtggcctggtattgctgtggatgctttggaggagcgtctggattggcttggctggacgaatggtgacggctacggcctggatggtgtgtatgctgcgaatcggctatcaaccgcgtcatgcgacgtccaccttgatgcactaatttttgggttgtcgtttgttgcgatcattcctcatggggatgggtcggtgtctgttcgtccacagtcaccaaagaattgcacaggccggttttcggctgacgggtctcgtctggatgctggccttgtggtgcagcagacgtgtgatcctgaggttgttgaggcggagttgttgcttcctgatgtgattgttcaggtggagcggcggggttcgcgtgagtgggcggagacgggccgtatcgtgaatgtgcttggtgcggttccgttggtgccgattgtgaatcgtcgccgtacttctaggattgatggccgttcggagattacccggtcgatcagggcttacacggatgaagcggttaggactttgcttgggcagtctgtgaatcgtgacttctatgcctatccgcaaaggtgggttacgggtgtgtcggctgacgagttttcgcagcctggctgggtcctgtcgatggcttctgtgtgggctgtggataaggatgatgacggtgacactccgaatgtggggtcgtttcctgtgaattctcctacaccgtattcggatcagatgcggctgttggcgcagttgactgcgggtgaggctgcggttccggaacgctatttcgggtttatcacgtctaacccgcctagtggggaggctttggctgccgaggagtctcggcttgtgaagcgtgccgagcggcgtcagacgtcgtttggtcagggctggctgtcggttggtttcctggctgcgagggcgcttgattcgagtgttgatgaggccgcgtttttcggtgatgtgggtttgcgttggcgtgatgcttcaacacctactcgggcggctacggcggatgctgtgacgaagcttgttggtgccggtattttgcccgcggattctcggacagtgttggagatgttggggcttgatgatgtgcaggttgaggctgtgatgcggcatcgtgccgagtcttcggatccgttggcggcgctggctggggctatatcgcgtcaaactaacgaggtatgataggcgatggcttcgggtgctatgtcgaggcttgctgccaccgggtatcagcgtgaggcggtcaggtttgccgggaagtatgctgggtattatgccgagcttggtcgtttgtggcattccgggaagatgacagatgcgcagtatgtgcgtttgtgtgtggagttggagcgtgccggccatgatggttcggcgtcgttggctgccaggtttgtgcaggattttcgccggttgaatggtgtggatccgggtttgattgtgtatgacgagtttgatgctgccgccgcgttggctaggtcgttttcgactatgaagattcttaagagtgacccggatagggtgaatgacacgattgatgcgatggctgcgggtgttaatcgggctgtcatgaatgctggccgtgacacggttgagtggtcggcgggtgcgcagggtaggtcttggcgtcgggtgacggatggtgatccgtgtgctttttgtgccatgttggctacgaggtcggattatacgactaaggaaagggcgctcacgactggtcatactcggcgtcataagcgtggtggtaagcgtccgtttggttcgaagtatcatgatcattgtggttgtacggtggttgaggttgttggcccttgggaaccaaatagggctgatgccgggtatcagaggacgtacgagaaggcccgtgagtgggttgatgatcatgggttgcagcagtcgcctagcaatattttgaaggctatgcgtactgttggcggcatgagataatttgatgtggtttccggttgtgtgccgccggttatcggtgcacagggttgtctcccgcacgggggtcaacaatgttgtgttgttttccgcaaggagtgtagggttaggctatggccgatcagagtgttgaggaacagaatgttgacaatgatgctgtggagtccggaaaggataacggcattgttgatacagtaaaagacgatggcgggcaggaggtagccgacaatcagtggaagaatgaaggcgagggtaaatcgccggggactgattggaaggcggaggcccgtaagtgggagtctcgtgctaaaagtaatttcgccgagttggagaagcttcgcgcctcggatggcgatgcggggtctgtgattgatgatcttcgccgcaagaatgaggaactcgaagacaggatcaacgggtttgttcttgagggtgtgaagcgcgaggtggctgccgagtgtggcctgtcgggtgatgctgtcgcttttctgcacggtgatgatcgtgacgcactggtggagtctgctaaggctttgaagggtttgatcgaccatagtagtggtggcgcgggtgtgcgccgtcttgcggggagtgcccccgttgatgatgttaaacgacgtgagggtgtcgcgtttgtggatgctcttgtcaataattctaggagatgatttgtgatggctgacgattttctttctgcagggaagcttgagcttcctggttctatgattggtgcggttcgtgaccgtgctatcgattctggtgttttggcgaaactgtcgccggagcagccgactattttcggccctgtgaagggtgccgtgtttagtggtgttcctcgcgcgaagattgttggtgagggcgaggttaagccttccgctagcgttgatgtttctgcgtttactgctcagcctatcaaggttgtgactcagcagcgtgtttcggacgagtttatgtgggctgatgctgattaccgtctgggtgtgcttcaggatctgatttcgcctgctcttggtgcttcgattggtcgcgccgttgatctgattgctttccatggtattgatcctgctactgggaagcctgcggctgctgtcaaggtgtcgctggataagacgaatcatgttgttgatgcaaccgatagcgctacgactgatcttgttaaggcggttgggctgattgctggtgctggtttgcaggttcctaacggtgttgctttggatccggcgttctcgtttgctctgtctactgaggtgtatccgaaggggtctccgcttgccggccagcctatgtatcctgccgccgggttcgccggtttggataattggcgcggcctgaatgttggtgcttcttcgactgtttctggcgccccggagatgtcgcctgcctctggtgttaaggctattgttggtgatttctcgcgtgttcattggggtttccagcgtaacttcccgatcgagcttatcgagtatggtgacccggatcagactgggcgtgacctgaagggccataatgaggttatggttcgtgccgaggctgtgctgtatgtggctatcgagtcgcttgattcgtttgctgttgtgaaggagaaggctgccccgaagcctaatccgccggccgagaactgatttattgttgcggtgatgtgtcaatgtgcagggggtggtgttgatgggtatcattttgaagcctgaggatattgagcctttcgccgatattcctagagagaagcttgaggcgatgatcgccgatgtggaggctgtggctgtcagtgtcgccccctgtatcgctaaaccggatttcaaatacaaggatgccgctaaggctattctgcgcagggctttgctgcgctggaatgatactggcgtgtcgggtcaggtgcagtatgagtctgcgggtcctttcgctcagactacacggtctagtactcccacgaacttgttgtggccttctgagattgccgcgttgaagaagctgtgtgagggtgatggtggggctggtaaagcgttcactattacaccgaccatgaggagtagtgtgaatcattctgaggtgtgttccacggtgtggggtgatggttgctcatgcgggtctgatattaacggctacgctggccctttgtgggagatatgatatgaccagttttccttatggtgaaacggttgtgatgcttcaaccgactgttcgtgtcgatgatcttggcgacaagtttgaggattggggtcatcctgtcgagactgtgtttcataacgtggccatctatgcttccgtttcgcaggaggatgaggccgcggggcgtgactctgactatgagcattggtcgatgcttttcaagcagtctgttgtgggtgctgattatcgttgccggtggcgtatccggggtgtggtgtgggaggctgacgggtctcctatcgtgtggcatcatccgatgtctggctgggatgcgggcacgcagatcaatgtgaagcgtaagaagggctgatagattgtggctcaggatgtgaatgtgaagctgaacttgccgggtatccgtgaggtgttgaagtctcctggggtgcagtcgatgttggctgagcgtggcgagcgtgtcaagcgtgcggcctcggcgaatgtgggcggtaacgctttcgataaggcccaataccgtgcaggtttgtcgtcggaggtgcaggttcaccgtgtggaggctgtggcccgtattggcaccacctataagggtgggaagcgtattgaggcgaagcatggcacgctggctaggtcgattggggcggcgtcgtgatcgtctacgatgaccccaggaagtgggctaaacgcgtgctcaaggatgatggctggctgtctgggataccgtgtacagggacagtgccggatagctttgagggtgacctgatttggcttgcgttggatggtggcccgcagttgcatgtgcgtgagcgtgtttttttgcgggtgaatgttttctcggatacgcctgatcgtgctatgagcctgtcgaggcgtgttgaggctgtcttggctgatggtgtggacggtgaccctgtagtgttttgtaggcgttctactggccctgatttgctggttgatggtgcacgttttgatgtgtattcgctgttcgagctgatatgcaggcctgtcgaatctgagtaaacgtatttgtttttgttttaatgtaattgtttgatatttaatgggggttgtgatggctgcaacacgtaaagcgtctaatgttcgctctgctgttacgggtgatgtctatattggtgccgctcatgcgggtgatactattgatggtgtgaagacggttcctgatgggttgactgctttagggtatctgtcggatgacgggtttaagattaagcccgagcgtaaaacggatgatttgaaggcttggcagaatgcggatgttgttcgcacggtggctacggagtcgtctatcgagatttctttccagctgatcgaatccaagaaagaggttatcgagctgttttggcagtcgaaggttactgccggagccgattcgggttcgttcgatatttctccaggtgccacgacgggtgttcacgccctgttgatggatattgttgatggtgatcaggttattcgctactatttccccgaggttgagcttatcgatcgtgacgagatcaagggcaagaatggcgaagtgtacgggtatggtgtgacgttgaaggcgtatcctgcccagattaataagaagggtgatgcggtgtctggtcgggggtggatgacggctttaaaagctgatactcctccttctccgaagcctcagccggatccgaatccgccttctgagaactgatacacgattttaagggattgttgataaatgagtgacacaggttacacgttgaagattggtgaccgtagctgggtgttggcggatgcggaggagacggctcaggctgttcctgcccgcgtgtttcgccgtgccgccaggattgcccagtcgggggagtctgcggatttcgcccaggttgaggtgatgttttctatgttggaggctgccgccccggctgacgcggtggaggccctggaggggcttcctatggttcgtgttgccgagattttccgtcagtggatggaatacaagcctgacggaaagggtgcctctttgggggaatagtttggctccacggcctgattgatgattatcgtggggccatcgaatacgattttcgcactaaatttggtgtttctgtttatgatgttggtggcccgcagatgtgttggggtgaggctgtccggctggctggcgtgttgtgtactgacacgtctagccagttggcggcccacctgaatggttggcagcgcccgtttgagtggtgcgagtgggctgtactggacatgttggatcattacaggtctgctaatagtgaggggcagccggagcctgtggcgaggccgacggatgagcgtagggcccgttttacgtctgggcaggtggacgatattttggcgcgtgttcgtgccggtggcggggtgtctcgcgagattaatattatggggtgaatagtgtatgtctggtgagattgcttccgcatatgtgtcgttgtatacgaagatgcctggtttgaaggcggatgttggtaaacagctttctggggtgatgcctgcggagggtcagcgttcgggtagtctttttgctaagggcatgaagttggctttgggtggcgccgcaatgatgggcgctattagtgttgctaagaagggcctcaagtcgatttatgatgtgactattggtggcggtattgctagggcgatggctatcgatgaggctcaggctaagttgactggtttgggtcatacgtcttctgacacgtcttcgattatgaattcggctattgaggctgtgacgggtacgtcgtatgcgttgggggatgcggcgtctacggctgcggcgttgtctgcttcgggtgtgaagtctggcgggcagatgacggatgtgttgaagactgtcgccgatgtgtcttatatttcgggtaagtcgtttcaggatacgggcgctatttttacgtctgtgatggctcgcggtaagttgcagggcgatgacatgttgcagcttacgatggcgggtgttcctgtgctgtctttgcttgccaggcagacgggtaaaacgtcggctgaggtgtcgcagatggtgtcgaaggggcagattgattttgccacgtttgcggctgcgatgaagcttggtatgggtggtgctgcgcaggcgtctggtaagacgtttgagggcgctatgaagaatgttaagggcgccctgggttatcttggtgctacggctatggcgccgtttcttaacggcctgcgtcagatttttgttgcgttgaatccggttattaagtcggtgacggattctgtgaagccgatgtttgctgccgtcgatgctggtattcagcgtatgatgccgtctattttggcgtggattaatcgtatgccgggcatgatcactcgaatgaatgcacagatgcgcgccaaggtggagcagttgaagggcgtttttgcgaggctgcatttgcctgtccctaaggtgaatttgggtgccatgtttgctggcggcaccgcagtgtttggtattgttgctgtgggtgtggggaagcttgttgcggggtttgccccgttggcggtgtcgttgaagaatctgttgccgtcgtttggtgctttgaggggtgccgctggggggcttggtggcgtgtttcgcgccctgggtggccctgttggtattgtgatcggcttgtttgctgccatgtttgctacgaatgcccagttccgtgccgctgtgatgcagcttgtgggggttgttggccgggctttggggcagattatggtcgctattcagccactgttcgggattgttgctggcgtggttgccaggttggctcccgtttttggccagattatcggtatggttgctggtttggctgcccggctggtgcctgttattggtatgcttattgcccggctggttcctgttatcacccagattattggtatggtaacccaggttgctgccatgttgttgcctatgctgatgccggttattcaggctgttgttgctgtgatacggcaggttattggtgtgatcatgcagttggtgcctgttttgatgcctgtgattcaacagattttgggtgctgtcatgtctattttgccgtcgattgttggtttgatacggtcgctgataccggtgatcatgtcgattatgcgtgtggtggtgcaggttgttggtgccgtgctacaggtggtggcccgtattattccggttgttatgccgatttatgtttcggtgattggattcattgccaagatttatgctgcggttatcgtttttgaggctaaggttattggcgctattcttcgtactattacgtggattgtgaatcattcagtgtctggcgtgaggtctatgggcacggccatcctgaatggctggaatcatattagagcgtttacgtcagcgtttattaacggtttcaagtcgatcatttctggcggcgtgaacgcggttgtggggttttttgcccggcttggttcttctgttgcctcccatgtgaggtctggttttaacgcggcccgtggcgctgtttcttctgcgatgaatgctatccggagtgttgtgtcgtcggtggcgtctgctgttggcgggtttttcgggtcgatggcgtctagggttcgtagtggtgctgtgcgcgggtttaatggtgcccggagtgcggcctctagtgctatgcatgctatgggctcggctgtgtctagtggtgtgcatggtgtgctggggtttttccggaatttgcctggtaatattaggcgtgcgcttggtagtatggggtctttgttggtgtcggctggccgtgatgtggtgtctggtttgggtaatggtatcaagaatgctatgagtggcctgttggatacggtgcgtaatatgggttctcaggttgcgagtgcggcgaagtcggttttgggtattcattccccgtcgagggtgtttcgtgaccaggttggccggcaggttgttgccggtttggctgaggggatcaccgggaatgcgggtttggcgttggatgcgatgtcgggtgtggctggacggctgcctgatgcggttgatgcccggtttggtgtgcgatcgtcggtgggctcgtttaccccgtatggcaggtatcagcgtgctaagggtgagagtgttgtggtgaatgtgaatgggcctacttatggtgatcctaacgagtttgcgaagcggattgagcggcagcagcgtgacgcgttgaacgcgttggcttacgtgtgattgcggggtgtggttcatgtttattcctaacccgtctgatcgtgccggtttgacggtggattggacgatgtttccgttgattggtaatgatccggagcgtgttcttcatttgacggattatacgggtgcgtccccggtcatgttgttgaatgattcgttgcgcggtttgggtgttcccgaggtggagcatttttctcaaactcatgttggggtgcacggctcggagtggcgcgggtttaatgtgaagcctcgcgaggtgacgctgccggtgttggtgtcgggtgttggtgaggatcctgcgggcgggtttcgtgacggttttttgacagcttatgacgagttgtggtctgcgtttcctcccgggggggagggggagttgtctgtgaagactcctgccggtcgtgagcgtgtgttgaaatgccggtttgattcggctgatgacacgtttacggttgatccggtgaatcgtggctatgcgcgttatctgttgcatttgacggcttatgacccgttttggtatggggatgagcagaagtttcgttttagtaacgcgaagttgcaggattggctgggtggcggccccgtcggcaagaagggtacagcgtttcctgtggtgttgacgcctggtgttggttctggctgggataatttgtctaataagggtgatgtgcctgcgtggcctgtgattcgtgttgaggggcctttggagtcgtggtctgtgcagattgatggtttgcgcgtgtcttcggattggcctgtcgaggagtatgattggattactattgatacggatcctcgtaaacagtctgcattgttgaacgggtttgaggatgtgatggatcgtttgaccgagtgggagtttgcgcctatcccgcctggcggttcgaagagtgtgaatattgagatggttggtttgggtgccattgttgtgtcggtgcagtacaggtttttgagggcttggtgaatagttgatggctggtcttgttccgcagataacattgtttacgccggattatcaccgggtggcgcctatcaatttttttgagtcgttgaagttgtcgttgaagtggaatggtttgtcgacgctggagttggtgttgtctggggatcattctaggttggatgcgttgactaagccgggggcgcggctggttgttgattatggtggtggccagattttttctgggcctgtgcgtagggttcatggtgtgggtccgtggcgttcttcccgtgtgactatcacgtgtgaggatgatattcgcctgttgtggcgtatgttgatgtggcctgtgaattatcgtcctggtttggtgggtatggagtggcatgccgacagggattatgcccattattcgggtgcggcggagtcggtggctaagcaggtgttgggggataatgcttggcgttttccgcctggtttgtttatgaacgatgatgagagtcgtggccgctatattaaggattttcaggtgcggttccacttgtttgccgataagttgttgccggtgttgtcgtgggctaggatgactgtcacggtgaaccagtttgagaataaggtgaaggatcagcggggtttggtgtttgattgtgtgcctgctgtgacccggaagcatgtgttgactgccgagtctggttcgattgtgtcgtgggagtatgtgcgtgacgccccgaaggctacttcggtggtggttggtggccgcggcgagggcaaggatcggctgttttgtgaggattttgacgcgttggccgaggacgagtggtttgatcatgtcgaggtgtttaaggatgcccgtaacacggattctgagcatgtgcatctcattgatgaggctgagcaggtgctgtccgagttaggggccacgtcggggtttaagatcgagttggctgagtcggatgtgttgcggtttgggccaggcaatctgatgccgggtgatttgatctatgtggatgtgggttctgggcctattgcggagattgtgcggcagattgatgtggagtgtgtatcgcctggtgatggttggacgaaggtgacaccggttgcgggggattatgaggataatccgtcggccctgttggctcgccgtgtggctggtttggctgcgggtgtgcgggatttgcaaaagttttagtaagtgattggggtttgttgtgggtattgtgtgtaacgggtttgatggtgtgttgaccgagtatgattgggctcaaatgtctggtctgatgggtaatatgccgtcggttaagggcccggacgattttcgtgtcggcacgacgattcagggtgccacagtgttgtgtgaggtttcgccggggcaggcttgggctcacggggtgatgtgcacgtcgaatagtgttgagacggtgacggggcagcttccgggcccgggggagacccgttatgactatgtggtgttgtctcgggattgggagcagaacacggccaggttggagattgttcagggtggccgtgcggagcgtgccagggatgtgttgcgtgccgagcctggcgtgtaccatcagcaactgttggctactttggtgttgtcgtctaacgggttgcagcagcagttggataggcgtgctgttgcggctagggttgcgtttggggagtctgctgcgtgtgatcctacccctgtggagggtgaccgtgtgatggtgccttcgggggctgtgtgggctaaccatgccggcgagtggatgctgttgtccccgcgtatcgaaacgggttctaagtcgatcatgtttggcgggtctgccgtgtatgcttacacgatcccgtttgagcggccgtttagcgctccgccggttgtggtggcgtctatggctacggcggctgggggtacgcagcagattgatgtgaaagcctacaatattactaataaggattttagtttagcgtttattacgaatgatggttctaagccgaatggtgtgcctgcggttgcgaattggattgctgtgggcgtgtgaccgggctgttgttgtggcggatggtgtgatgttggggggctgtggtgtcgtggtttactcctgcactggtggcctctatttgtaccgcattggccacgattttgggttctgttcaggcggttacttacaggtcgaagaagaggcttaggcagttgtctgcgcaggttgatgcgatggaagaatacacgtggaatattcgccatattgttcaccgctataacgcgaatctgccggagaatgttgagccggtaaagatgcctgatttgcccgagtttttgaaggatactgttgatggtggtggggggtgaattgtgagggagttggaggaggagaagcggcagcgccgctcgtttgagaaggcttccctgatactgctgttcctgtcgcttgtactactagcggtggttgctgggggtgctttgcggtacgggtctgtggcttcccaaagggattcggagcaggctaaagcccagtcgaatggtacagccgccaagggtttggctgcccgtgtgaagcgggtgtgtgcctctggcgggcaggagtcggtgcggcttcaccagtctggcttgtgtgtggatgctcagcgtgttgagcgtagcgtgcagggtgtgcctggccctgccggtgagcgtggcccgcaaggcccgcaggggccgcaggggccggctggtgttgatggttcggctgggctggttggccctgttggtccgcagggttccccgggtttgaatggtgtgaaaggtcctgacgggttgcctggcgctaacggttcggatggccatgatggtgttgctggccgtgcaggtgtcgccggtgtgaacggatccgatggcaaggatggtcgggatggttcggctggtgagcgcggtgatgtgggcccttcaggtcctgccggcccgcaaggtgcacagggtgaacggggtgagcgcggccccgccggtgtgaacggatccgatggcaaggatggtaaagatggtaaggatgggcgctcggtggtgtctgtgtactgttctggggggcgcctgtttgtgaaatatagtgacggtgcggcttctaccgtgtcgggttcggtggcttgtgagagtgtgaaaccatcacctgtggttaccgtgtcatcccgcaagtaaaaaaagaaaagggaagggtgttactagtgttggtcgtgtttgggggtggtgtgtggtgagatacattccagcggcgcatcactcggccggttcgaatagtccggtgaatagggttgtgattcatgcgacatgcccggatgtggggtttccgtccgcttcgcgcaaggggcgggcggtgtctacagcaaactattttgcttccccatcgtcggggggttcggcgcattatgtgtgcgatattggggagacggtgcagtgcttgtcggagtctacgattgggtggcatgccccgccgaatccgcatagtttgggtatcgagatttgcgcggatgggggttcgcacgcctcgtttagggtgccaggccatgcttacactcgggagcagtggcttgatccgcgggtgtggcctgcggtggagaaggctgccatcctgtgtagacgtttgtgtgacaaatataatgttccgaaaaggaagcttagtgcagccgatttgaaggccggtaaacgtggtgtttgcgggcatgtggatgttacggatgcgtggcatcagtcggatcatgacgatcctgggccgtggtttccgtgggacaggtttatggccgtagtctgcggcggtagtagtagtgatagtggggagttaactgtggctgatgtgaaagccttgcatgatcagattaaacaattgtctgctcagcttagtggttcggtgaataagctgcaccatgatgtgggtgtggttcaggttcagaatggtgacctggcgcgccgtgtggaggccttgtcgtgggtgaagaatccggtgacggggaagctgtggcgcaccaaggatgctttgtggagtgtctggtattacgtgctggagtgtcgcagccgtatagacaggcttgagtctgctgtcaatggtttgaaaaagtgatggtggtttgttgtgggtaaacagttttggttgggcttgtttgagcgtgccctgaaaacttttattcaaacgtttgttgctgtgcttggggtgacggcgggtgtcacgtatactgcggagtcgtttcgcggtttgccgtgggagtctgccctgattacagccggggtggcggcaatactgtcggttgctacatcgtttggtaatccgtcgtttgtggccggtaaacctaaaaccacggttgtggatgctgggcttgttccatccgatgatgggggcatggttgagccgcatatggtggacgtaacggatcctggcatgatagagcctatcgacgatgccgatgctggaggctatgtgccgaggcgtgcagccgaggctgaggttggcacggtagagtctactgttgcataattgaatatgtgtgtgtgccccagcggtgctgccacgatcgtgtggtggttgccgctggggcactatttctgtttatgcggtgtggctatgattcgtttctgtcgatggtgtcttcgagcatctgatacaggtggaggcaggtagagatagtttcgctggcctggtctagaacgttccggccgataacgtttttgtggttgtcgcggtggcggatgatagcccacatgatctcgtcggctgccgcctgcaatagttttgcctggtatgcgattccggcgagccagtctagtgcttcctggcttgcataggggctatggtcctcgctgttgccacgggtgttgctgttgtttgtggggtgtcctgcactgtcgcataaccacaggatttcgctgcactcgtctagcgtgtcctggtcgatagcaagatcgtcgaggctgacttcgttgacggtaaggttcacgttgtcgagggagatgggtacaccgtactggttttcgacactgtcaacaatgtttttcagctgttgcatgttggtgggctgttgttggacgatgcggtgtatcgctgtgttgagggtggtgtaggtgatattgtgtgtgttgttcatcgtgttatgccattccttcgttatcgtctggcatgtagtatcgactgtttgcgtactcggttaacgtcatcagtgtttggtctgcccactgtttcacagtctgccgggtcacacccaatcgttgggcggccgacgcataggtttgatcatacccgtagacttccctgaatgcggcaagccgtgctagccgtttccgctgtttggatggttcacatgtgagggtgtagtcgtcgatggccagttgtagatcgatcatggtgacgatgttgttgccgtggtgttgtggcgcggttggtgggggtggcatgcccggctctacactcggtttccatgggccgcagttccagatccattgggcggcttggatgatgtcggcggtggtgtaggtttggttcactggtcaccccttgaataggttgtcgaggttgtctgggttgctggtgttggtggtgtcgaatcgtccgacgcagtggcagtagtcgtacatgagtttgataatgtgttggtggtcgccgaggtaggtgtttccgctgatgctgtaggtggctgtgccgtctttgctgatggtgtatttggcggtgatggtttcgggtgtttcggtgttggtgatgatggcggtggtggtggagcctactgtttgtagcctggtggtttgggttccgtcgtcgaggatggtagtaaccatgagggttgtcctttagatgctggtttggttgtcggctagatgaataatatcggataaaggtttcggctggtctaggtgttgtatggttttgttggctagccgtttggctaccctgtaacacattttggtgtagtgtttgttgtctaggttgtggtattgttcccgcaccgcaatatatagtagggagtcttggtacaggtcgtctgcactgattgcggggtagtgtccggctgttttggtgcatgcccggttgagtgtgcggagatgatggtctgtggcccatccccacgatgcggtggtggccaggtcggcttttgttggtcgtctgctcatagcatctcttttatctggctatctggtagttgtttggtgttttattatgtatagtgtagcacacgagtccggggttgccggtggcgcctgtgcggtgtcggtaccagactgattctccttccattgatgggcattggatgaaggtgcgttgtccttgctcggagatttcgaggtggtgtcggtgtcctgccatgagtatgtgtgatgtggttccgttgtggaattcttggccgcgccaccattcgtagtgttggttgttgcgccattggtgcccgtgggcgtgcaggatggtagccccggctacgtttacggtggtggtcatttcgtcccgctgggggaagtggaagtggaggttggggtagttgttggtgagttggtaggcttctgcgatggcgcggcagcagtccacgtcgaaggagtcgtcgtaggtggtgactcctttgccgaatcgtacggcttctccgtggttgccggggatggatgtgatggtgacgttggcgcagtggtcgaattggtgtatgagttgcatcatggccatgcgggtgagtctgatttgttccgtcaagggtgtttgggtgcgccaggcgttgttgcctccttgtgacacgtatccttcgatcatgtcgccgaggaatgcgatgtggactctttgcggctgcccggcttgctgccagtagtgtttggtggctgccagtgagcgcaggtagtcgtcggcgaagtgtgctgtttctcctccggggatgcctttgccgatttggaagtcgcctgccccgatgacgaaggctgtctcgtcactgctttgggtgtcttgttcgggtttgggtggctgccattcggctagtttatcgacgagttcgtcgaccgggtaggggtcggttgcgggttggtggtcgatgattttttgtatggatcggcctgtttctccgttcggtaaggtccattcggagatgcgtgtgcgccgcacggttccgttggctagatcatcattaatggtgtcgatggcgttgtcgtggttggctagctgtgtgaggagccggtcaatattgtctatcactggttttcctcctccttctgggtgttggtttgtttgcggcgatagtctttaataacggtggcggagatggggtatcctgcctgggtgagcatttgggctagctgtgtggcgggtatagacctgtcggcgagcacgtcggctgctttgttgccgtagcgttgaataagggtttcagttttggttgccatggtgtcctatcggttgtgtggtgggctgccatcctgtgcggcagtcgccgtcgtgtcctggtttgcgtgtgcaccacgatgttgttccgtctgtgtggttgagtgttttgccgcacatgacgttttgtagatgctccggcagctcgctattgctatcgtcttgctcgtctagcaaagttttttgttgggtgaaaaactcggacacggtgccgttgtggactgggagtatccatgttttccattgttgttgcatccgggtgttccagtggaattgtttggcggcgttttctgcctgttttatggttttgtagtagccgacgagtatgcgctggtgcggctggtcgggcgggttttggcctcgccagtattgtgctgcgacggcgtaacggttgttttctgtgaaggtgttccagcagtattcgataatgttgttgagtgtgtcgtctgtaacatctatgtcgctgtttagtgtttcttgggcgatgatgtcgcggatggcttgccgatttttggtggtgggtttgaaggtgatgctcacgatagtaccggctcgtcttgcaggaactggttgaaggagccgtctccagcatgttgtgcctgtgtgatgtcctggtcggtccagtcggggtgctgctgtttcagatagtgccagtggcacgcattgtatgtttcgttttgtagccgtgtgagatggttttcttcgatgatttgtttccacatggtccatgacacgtcgagccggttgaggatttcgagggctgggatgttgaattggttgaggaacaggatttcgtgggtgtagtattccttctcgtattggtcccatccgcttcggtgcctgttgggctggtttttggggtaggcttcccggcatactttgtgcaaatgtttggccatgtcgtcgggtagtttaatgtcggggttggcgcggatcatggatcgcatcccatcataggtggtgccccaggtgtgcatgatatgtagtgggttttctccatcagcccatttttctgcacagatggcgaggcggatacgcctcctagtggccttactcgtgtcgcggcggccggggatggggcacgtgtcgaggggatccatgatgctttttatgcctttctttgttgggggttgcttgtgtggttttactgtagcacagtgtcgagtgcttgtgtcaaccctgtttttccggcctgcagataggtgtctgtgacatcccccagggtgaggggcacatgggtggcttgggggagtgctgcctggatggtttgtgccatctgttcgcctgccgggtctgggtctgaccagatgtagatgtggtcgtagccttcgaagaattttgtccaaaagttttgccacgaggttgcgccgggtagggcgacggcgggccatccgcattgttcgaggatcatggagtcgaattcgccttcgcaaatgtgcatttcggctgccgggttggccatggcggccatgttgtatatggagcctgtgtcccctgccggtgtcaaatatttggggtggttgtgggttttgcagtcgtgtgggagtgagcagcggaaacgcatttttcgtatttcggctggcttgccccaaacggggtacatgtaggggatggtgatgcactggttgtagttttcgtggcctgggatggggtcattgtcgatgtatccaaggtggtggtagcgggctgtttcttcgctgatgcctcttgccgagagcaggtcgagtatgttttcgaggtgggtttcgtagcggactgaggctttctggattcggcggcgctccgcaatattgtatgggcgtatgctgtcgtacattcgggtttctttcttctaatcgttgttgtagctgggcgagtccgcctccgacaccgcatgtgtggcagtaccagacgcccttgtcgaggttgatgctcatggagggctggtggtcgtcatggaacgggcagaggatgtgttgctcgtttcgtgacggattgtagcgtatccggtaggtgtcgaggaggcggcaggtgtcagaggtgtgggaggagctcgttgagggttgataccacataggcttcgctccagggtttgttgcgctgtttcatgatgacgagtccgatggtggactggttttcgcggtttcggtgggtttcgtagttgcgtgcctcccggctggcttgtttcacgaattgggcgaggtgtggctggccggctttggcttcgatcacataggtgtggttgccggttgtgaggatgaggtcgccttcgtcttctcgcccgttgaggtggaggcgttcgatattgtggccggtgtcgcgtagctggtggaggagtctcgtttcccattctgcgccggcccgccggttgcgtgcctgttgtgtggccatcatagtcctttgtgtgttgtggtcatgttccagggctgtttttctacgagtggcccgaagaatgtgtattcggggtaggctctgagtctttcgtatcgggtgccgtctgggctggatttgccggtgcgctgttttagcacggcgatgcgcgcctctgccggtatcgtgagcccgttgccgttatcttcgccaccatacaatgagactccgaggatgagttgtggtttttcggagaggccgtttttgatttcccgcctggctggcgggtgttcaatatcggtgccggttttgtcggttgcgtggtgtgtgacaataatggtggatcctgtgtcgcggcctagcgctgtgatccattgcatggcttcttgctgtgcctggtagtcggattcgcagtcttggatgtccatgaggttgtcgataacaatgatgggcgggaaggtgttccacatttccatgtaggcttgcagctccatggtgatgtctgtccatgtgatgggtgactggaacgagaatgtgatgtgttggccgtggtggatgctgtctcgatagtattctggcccgtagtcgtcgatgttttgttgtatttgctgggtggtgtgttgggtgttgagtgagatgattcgtgtggaggcctcccagggtgtcatgtcccctgatatgtagagggcgggctggttgagcatggcggtgatgaacatggctagcccggatttttggctgccggagcgccccgcaatcatgacgagatcccctttgtggatgtgcatgtccaggttgcggtagaggggttctagttgtggtatacggggcagttcggcggcggtttgggaggctctctcgaaggatcgttgtagagagagcatcggaaccttatctatctgttacggtttgggcggagagtggtggtcagatggagtcgatgtccacatcatcactgcccgtggtgttgggctggctgtctcgcttgtcaacatatgctgctacgaggtcgtagatggcgtcatccaatggtttgagaataacggcgttgaacccgtttttggtgcgcacagtggctagtttgaaggcctgctcttctcccaggtaggtttcgagttcgcggatcatggagtgtggccggtcgttgttgcctcgcgctttctcaatgatagcgttggggatggtttctggggtgccgttgttgagatcatctagggtgtggaagatggtcacatcagcgtagatgcggtctgcggtctgtccgccgtagccttcagtgttgtgctgcacgtcgtggattttgaaggcgatggcggtggcgtcctggtttcgggacgggttgaagaaggtgctgttgctgttgttgcggtagttggcgagtcccataactgttttccttttactgtttatgtttggttttgttggtttgtgtcggtttttatcgggtgaggctgttgcgtttgctgcggaaggcctctgacacgtcactgttactggtaataatctttttgtactgtttcaaaaggtcggctagctgtgtcttgctggttgcgttgctgattttgtcgatgacgatggtgttttcttgggatgcgatgttgtctacatagtttttggcggcctgatcgtatcggtcttggagaataatggatgcgctcgcgatcagggttgcgagatcccagtctttagagacggtgttgtctttgagtccgcctagcaggtcaataatggattgtttgatgtcgtctgtggtgtctccgcggatgaccgcccacggggctgcatagtcgccgccgtatttgagtgtgacggtgatacggtcatcaccactgctgttggtatcggtcactggttctcctcatctttctctgtcggtggtgtgatggtggtttggatcgggtacctgtaggcgtctttcccgttgacggcccagcatgcgtcccgtacggggcatcctttacacattgtggtgacatgggggacgaagatgccttcgctgattcctttcattgcttgactgtacatggatgatacatgccggtaggtgttgttgtcaagatcgtacagttcggtggctgtgccctcggttggcgatgtggtgttagtgcggctgatggcgggggtccaaaacatgcctttcgtcacctggatgccattctgggcgagcatgtaccggtaggtatgcaactgcatagcatcaaccggcagtcgaccggttttgaggtcgaggatgaatgtttcgccggtgttggtgtcggtgaagacacggtcgatgtagccaacaatcttggtgccgtcctggagtgtggtttcgactggatattcgatgcctggctggccgtccaaaaccgcggtgtggtattgtggatggtttgtgcgccactgtttccacctgtcgacgaagatggggccatagtgcatccaccagtcgtagtcttttttgttggggcctccggtttcgcacatgtttttgcacactctgccggagggtttgatttgggtaccctcttctttgactagggcgatttgggtgtcgaaaacattgttgaaggatgagagtttatcgggtatttcggggtattctgcgggattgtacaggtggaggtcgtattgttcggtgatgtggtgtatagcactgccggcgatggtggcgtaccaggtgtggtgttgtgcatggtagccgtgggataggcgccatttttctccgcattcggcccactgggacagggaactgtaggagatgtggcctggatggttgatgattttcgggtgttgtgctagaggcatgttagttgtttttgttccatgggttgcgggtgtctaatccggcgtcatgctgctggtaggcgaggagtgcgaggcagtgccaggcagcgtgtgccaggtggggtagccctgattcatcgtcgaggttgtgtccttgctgccaggctagcaggtgcctatagagggcgtcaacactgtggctccacgggtatcctccggtccagttgttgtcgccgtatttggtggcgccgtatccggctacttcgccgagcgagtggagggatgcggggtcgatgagggagagcctgcacagtttcaattcttttcgggctccggtgttggggtcggtgtacatgctggtgggctggtccatggggtgtgtgctccttaaaggtgggttactggttgttgttgtgggcgagtgcgacggcgagaataatgatggcgagggtttcagcaataagtatgggtgttgtgatcatttggtgttgtggggattgtaggtgagggttgatgcacctagaagcgatgcgagggcgcatgcggcgatgatggcgagggcggctttgtggctggtgccggtggcgtacatccatgtgatgatgccgccttggatccaggcgaggctggtgaagaatgtttcgtaactgtgcaactcgatgttgttgggtgtgttcatgactgttcctggatgatggtgttgatggttttgtagatgttgtacaggtcggtttcgatggtttgtagctgtttgatttggtggtcgaggttgatgtctgggttgagggtgttgatgcgggatgcgatgtcggtggctgtgcggagtgtgccgccagtgtggtgaatgatatgtgcggtgtcggcgaggccggtggtgacagcatagtgggagaggagaggcatagcggtccttggcgggttagtgttgcgggttgatgttgaggtcggtgacgtggggtgtgttttctgttccggtgacgaggcagtgaacagtgacagggagtttggaggctcccggctgacggatggtggcgccgtagacgatgctgaatgtgtctttgtcaatgattttgtggagttggaggtcgatgtcggggttgccgttccatttgacgccttgggcggcggcctgctgttcggctttgcggttgcaggtgtgggctgcggtgatcatggtgagaccctgcgctgtttcttctccgcgctgctgtgcttgctggtgtacctttttttgttcggcttgtagggagcggactgctgcggccttcctggctgtcttctcagctttgcgctgctggacggtttcgggcgtccattcggtgttggctgtggtggcttgtggtgcgggctgtgaggcgagtggcgggttgtcgtcgggtgctggcatgaatgatgctgcggcgatgatggcggctgtgattccggcgatggtgtagcctgttttcttgttcatggctctgtgttcccctttcgtggggtttgttcgttgctgacatgattaatcatggtgtgggcggtggcctgtgtcaaggctgcgctcaacgattgtgagcgatccttgtgtggctaggggttttatcgggcgcacagggtgagtaggtggccaacgttgatgcgggtcacattccagtagagttgcgtggcttcaccgccggtgagcggcttccactcgtcatggctgaacacggcgccgtcggatgcgatgaatgtgttggggcgtagtttgtggagttcggcttccacgctctgccggtaggcttcggcgaggccctcaaaatcgaggtggtcgcaggagaggttttcgaagcgtgtcaagtcgaagggtatggggcagtcgtagctggtgggggtgtagagctgggtgaagtggtcggcgatcttatgcataacgggttccttttctggtgatggtgtgttgagggtttatcgggtggatgctttgaggattgcgtctatgtcgatcatgtcgatgagatcgtggagttcctcggcttcattctcggtgagcggctgccagtcgggtggcccgtatagggcgccgtcgcgggtgacagtccacaggggccggatgagtagtatggcttcttgtactttagcgtggtacatgcggcgcaccatatcgagatccatgtcgtctgaatggtctccggtgaggctgtggaggctgagcgggtcgatttcggtctgcctgtagagggatgtgaaggatggggtgatgagtgtgccatccatgggtgtgctcctttcggtggtgtaggggttgttgtggtttctagggtgtgatggctgcgaccctacagtcaaggctgcgctcactaggtttgagcgtttcatgctggagtgtcgggtgtgacagatgtcactgcagtctctatggcctctctcagcgtctcaaatcatgtgggggtaggattatatagggttggccctgctgatcgattctagggcccttctagggtgtctcgggggtatgtctgggtgatagcaggtgttgcagatcattcggaaggtcgaggttggcatacatcacgatagctggggtgctatttctgggcatggaatctacaccctcatactgtgtgagatgtatcacatcctcctggcttggtgtgcaccctcaggatcactctgccgatctggcgtgaagggtgtagcccagaaatgccgtttaaagccttcacacgacgcctaggagcgccttacagggtgggggctaggtatttatacccccagcatattctgatcgattctagacgcctccaggagtctgctacgcgatcaaccatctcggcatagaccatcaacccttacatcagttagctaagcctcaactatgtggacagtgtgggatactgtagggggaagaaggacacggtaaaagaaagaagggggagcatcagccttaggatcttagcactgatggacttagcaccgagcccctcaagggctcggcatcagcctcatcgggcttagccgatcaggcacagacctgaaaggagtacacgccatcaggaaaggcttgagagtacgaggagccttagcgacgagtactcgaaagcctgagggaacacccatcagcactgatgggcctagcgtgttcggaaaggacacaagagtgaagtgtgagagctgtccgggagtgaaacccgttctgactaggggtttcagccttaaccacccccaaaggttacaagactctaagaaaatttaaggaaaagtttaggtttaatttttggacctttactaccaaaaacacccgtttacacccctcaaacccgcctatagagccaaacgctggtgttgagggtatctctacctagtgtgataggctggacaggtagccagctggacgcaaggccgaaatccgctgacgcggctttcacccttacatccatcagtctaccaaacacttaaaagcttcaaggcttagcgctaagcccttaagaccttaacgcttagcaccgagcccctcaagggctcggcatcagtcttaaagccttaaacacttaaagtaactataagaccttaaagaccttaagtacttaaagttaaccatcagtcttaaactttaatattatacctataagtcttaaagcttataggtataataatataatataagttataaaagttttagaagagctaaggggttaacttctttacttctctactctctttggttctttctctcttctcttcttttcttcatcaggggagaagaggaacctttaccgtcaacgctgattggctttcaccgtgtgactcgtgtaccaccggtcgcacgctccccacactctgacacccgtgtccctttcatgcttagcgtgttcggctgaaggcgtacggcgtgtcacgctaacacccttaacactaggtaagacttaaagtgtatattataggtagaagactttaaaaacctctaaggtgttcccgcttagcctgtgttctacaccgctaggcgccaagtgctaagctttgaaacgcgaacactcacccaccctcatttttctttcgtgtccttctcttttgacaccgctggggggcgatgtgatctttctcacatgccagggggtgtgagggaaaacaaccaccccggaacgttcaagacaccccctcaaagccacaaaacagcccccagaatcgactagcagggcaagggcagagtattcatacccccaacggtttccaggccgttagaggggcaaataagacccgtacagggctagacgaggaacagacacatcatggcacgaaccaaccgcacagccagccaagcccaccggcgctggcggcaacgactcatcacccaagcccgacagcaaggccaaaccgtctgcccactctgcggagtcaccatcacctgggacacccaccagctgccaaccagccccgaagccgaccacatcacacccgtcagcaggggaggactcaacaccctcgacaatgggcaaatcatctgcagaacatgcaacagaagcaaaggcaacagaacacaaccaaacattcaattccaacaacaaaccacaaaaacacttgtttcatggtgaaaaacccgccaacccccaccggggacaccccctgcacaggcgtgcaagacc

SEQ ID NO: 36 - DNA, 29200 bp, Bacteriophage of P. acnes
agtgaaatacctcccttttgtggttttgtctgtttgtcgactttttgtgttggtggtgagtgttgtgcagcctgagcttcctgatagtcgtgattggtgtggggagacgcgtcgttggtggcgtgtgtggggtgaggatagccgcgcgcagtacgtgtctgatgaggagtggctgtttctcatggatgctgcggtgattcatgattgtgtgtggcgtgagggtcgcgcggatttggtggcttcgcttcgtgctcatgtgaaggcgtttatgggtatgttggatcgttattcggttgatgtggcgtctggtggccgtggtgggggttctgcggtggcgatgattgaccggtataggaagcgcaagggggcttgagtaggtgtctggtgttgttgggtctcaggttcctcgtcatcgtgtggctgcggcgtattcggtgtctgctggcggggatgctggtgagttgggtcgtgcgtatgggttgacgcctgatccgtggcagcagcaggtgttggatgattggctggctgtcggtagcaatggcaggcttgcttcgggtgtgtgtggggtgtttgtgcctcgccagaatggcaagaatgctattttggagattgtggagttgtttaaggcgactattcagggtcgccgtattttgcatacggctcacgagttgaagtcggctcgtaaggcgtttatgcggttgcggtcgttttttgagaatgagcggcagtttcctgatttgtatcgtatggtgaagtcgattcgggcgacgaatggccaggaggctattgtgttgcatcatccggattgtgccacgtttgagaagaagtgtggttgtcagggttggggttctgtcgagtttgtggctcgtagccggggttctgctcgcgggtttacggttgatgatttggtgtgtgatgaggctcaggagttgtcggatgagcagttggaggctttgcttcctacagtaagtgctgccccgtctggtgattcgcagcagattttccttggtaccccgcctgggccgttggctgatgggtctgtggtgttgcgtttgcgtgggcaggcgcttggtggtggtaaaaggtttgcgtggacggagttttcgattcctgacgagtctgatccggatgatgtgtcgcggcagtggcggaagttggctggtgacactaatccggcgttgggtcgtcgtctgaattttgggacagtctcggatgagcatgagtcgatgtctgctgccgggtttgctcgggagcgtcttggctggtgggatcgtggccagtctgctgcgtctgtgattcctgctgataagtgggttcagtcggctgtggatgaggcggctctggttggcgggaaggtttttggtgtctcgttttctcgttctggggatcgtgtcgcgttggctggtgctggccggactgatgctggtgttcatgttgaggttattgatgggctgtcgggaacgattgttgatggtgtgggccggttggctgactggttggcgttgcgttggggtgacactgaaaagatcatggttgccggatctggtgcggtgttgttgcagaaggcgttgacggatcgtggtgttccgggccgtggcgtgattgtggctgatactggggtgtatgtggaggcgtgtcaggcgttcctggagggtgtcaggtctgggagtgtttctcaccctagggctgattctcgccgtgacatgttggatattgctgtgaggtcggctgtgcagaagaagaagggttctgcgtggggttggggttcctcgtttaaggatggttctgaggttcctttggaggctgtgtctttggcgtatcttggtgcgaagatggcgaaagtgaagcggcgtgaacggtctggtaggaagcgggtgtctgtggtatgaactcggatgagttggctttgattgagggcatgtacgatcgtatccaaaggttgtcttcgtggcattgccgtattgagggctactatgagggttctagtcgggtgcgtgatttgggggtggctattcctccggagttgcagcgtgtgcagactgtggtgtcgtggcctggtattgctgtggatgctttggaggagcgtctggattggcttggctggacgaatggtgacggctacggtctggatggtgtgtatgctgcgaatcggcttgctacggcgtcgtgtgatgttcatttggatgcgctgatttttggtttgtcgtttgtggctgttattccccagggggatgggtcggtgttggttcgtcctcagtcaccgaagaattgtactggccggttttctgtcgatgggtctcgtttggatgctggccttgtggtgcagcagacgtgtgatcctgaggttgttgaggcggagttgttgctgcctgatgtgattgttcaggtggagcggcgtgggtctcgtgagtgggcggagacgggccgtatcgtgaatgtgttgggtgcggttccgttggtgcctgttgtgaatcgtcgccgtacttctaggattgatggccgttcggagattacgaggtctattagggcttacacggatgaggctgttcgcacactgttggggcagtctgtgaatcgtgacttctatgcctacccgcaaaggtgggtgacgggtgtgtcggctgacgagttttcgcaaccgggttgggtcttgtcgatggcttctgtgtgggctgttgataaggatgatgatggtgacactccgaatgtggggtcgtttcctgtgaattctcctacaccgtattcggatcagatgcgtttgttggcgcagttgactgcgggtgaggcggctgttcctgaacgctatttcgggtttatcacgtctaacccgccttctggggaggctttggctgcggaggagtctcggcttgtgaagcgtgctgaacgccggcagacgtcgtttggtcagggctggctgtcggttggtttcctggctgccagggcgcttgattcgagtgttgatgaggccgcgtttttcggtgatgttggtttgcgttggcgtgatgcttcgacgccgactcgggcggctacggcggatgctgtgacgaagcttgtgggtgccggtattcttccggcggattctcggacggtgttggagatgttgggtttggatgatgtgcaggttgaggctgtgatgcgtcatcgtgccgagtcttcggatccgttggcggcgctggctggggctatttctcgtcaaactaacgaggtttgataggcgatggcttcgggtgctatgtcgaggttggctgctgccgggtatcagcgtgaggcggtcaggtttgctgggaagtatgcgggctattatgccgagttgggtcgtttgtggcattccgggaagatgacagatgcgcagtatgtgcgtttgtgtgtggagttggagcgtgccggccatgacggttcagcagctatggctgctaagttcgtgcaagattttcgccggttgaacggcgtcgatcctggtttgatcgtgtatgacgagtttgatgctgctgcggctttggctaggtcgttttcgactatgaagattatgaatagtgacccggatagggcgaatgatactattgatgctatggcggcgggtgttaatcgtgctgtcatgaatgctggccgtgacacggttgagtggtctgctggtgcgcagggtaggtcgtggcgtcgggtgactgatggtgatccgtgtgctttttgtgccatgttggctacgaggtcggattatacgactaaggaaagggcacttactactggtcatacgcggcgtcataagcgtggtggtaagcgtccgtttggttcgaagtatcatgatcattgtggttgtacggtggttgaggttgttggcccttgggaaccaaatagggctgatgccgagtatcagaggacgtatgagaaggcccgtgagtgggttgatgatcatgggttgcagcagtcgcctggcaatattttgaaggctatgcgtactgttggtggcatgagataatttgatgtggtttccggttgtgcgctgccggttattggtgcacagggttgtctcccgcacgggggtcaacaatgttgtgttgttttccgcaaggagtgtagggttaggctatggccgatcaaaaagttgaagaacagaatgttgacaatgatgttgtggagtccggaaaggataacggcattgttgatacagtaaaagacgatggcgggcgggaggtagccgacaatcagttgaagaatgaaggcgagggtaaatcgccggggactgattggaaggcggaggcccgtaagtgggagtctcgtgctaaaagtaatttcgccgagttggagaagcttcgtacatcgagtgacgattctgggtctactattgatgagcttcgccgcaagaatgaggaactcgaagacaggattaacgggtttgttcttgagggtgtgaagcgcgaggtggcttcagagtatggtttgtccagtgatgcgatcgctttcttatcgggtggcgataaggagtcgcttgccgagtctgcgaaagctttgaagggtttgatcgaccatagtagtggtggcgcgggtgtgcgccgtcttgcggggagtgcccccgttgatgatgttaaacgacgtgagggtgtcgcgtttgtggatgctcttgtcaataattctaggagatgatttgtgatggctgacgattttctttctgcagggaagcttgagcttcctggttctatgattggtgcggttcgtgaccgtgctatcgattctggtgttttggcgaagctttcgccggagcagccgactatttttggccctgttaagggtgccgtgtttagcggtgttcctcgcgctaagattgttggtgagggcgaggttaagccttccgcgtctgttgatgtttcggcgtttactgcgcagcctatcaaggttgtgactcagcagcgtgtctcggacgagtttatgtgggctgacgctgattaccgtctgggtgtgcttcaggatctgatttcccctgccctgggtgcttcgattggtcgcgccgtggatctgattgctttccatggtgttgatccggctacgggtaagcctgctgcggctgtcaaggtgtcgctggataagacgaagcatattgttgatgccacggattccgctacggctgatctggtcaaggctgtcggccttatcgctggggccggtttgcaggttcctaacggtgttgctttggatccggcgttctcgtttgccctgtctactgaggtgtatccgaaggggtctccgcttgccggtcagcctatgtatcctgccgccgggtttgctggtttggataattggcgtgggctgaatgttggtgcttcttcgactgtttcgggtgccccggagatgtcgcctgcctctggtgttaaggctattgttggcgatttctctcgtgttcattggggtttccagcgtaacttcccgatcgaactgatcgagtatggcgatccggatcagactgggcgtgacctgaagggccataatgaggttatggttcgcgccgaggctgtgctgtatgtggctatcgagtcgcttgattcgtttgctgttgtgaaggagaaggctgccccgaagcctaatccgccggccgagaactgatttattgttgcggtgatgtgtcaatgtgcagggggtggtgttgatgggtatcattttgaagcctgaggatattgagcctttcgccgatattcctagagagaagcttgaggcgatgattgccgatgtggaggctgtggccgtcagtgtcgccccctgtatcgctaaaccggatttcaaatacaaggatgccgctaaggctattctgcgcagggctttgttgcgctggaatgatactggcgtgtcgggtcaggtgcagtatgagtctgcgggtcctttcgctcagactacacggtctaatactcccacgaatttgttgtggccttctgagattgccgcgttgaagaagctgtgtgagggtgatggtggggctggtaaagcgttcactattacaccgaccatgaggagtagtgtgaatcattctgaggtgtgttccacggtgtggggtgagggttgctcgtgcgggtcgaatattaacggctacgctggccccttgtgggagatatgatatgaccagttttccttacggtgaaacggttgtgatgcttcaaccgactgttcgtgtcgatgatcttggtgacaaggttgaggattgggggcatcctgtagaaaccgtgttccataacgtggccatctatgcttccgtttcgcaggaggatgaggctgcggggcgtgactcggattatgagcattggtcgatgcttttcaagtcccctgttgtgggtgccggttatcgttgccggtggcgtatccggggtgttgtgtgggaggctgacgggtctcctatcgtgtggcatcaccccatgtccggttgggatgcgggcacgcagatcaatgtgaagcgcaagaagggctgatgggtagtggctcaggatgtgaatgtgaagttgaacttgccgggtattcgtgaggtgttgaagtcttctggggtgcagggcatgttggctgagcgtggcgagcgtgtcaagcgtgcggcctcggcgaatgtgggcggtaacgctttcgatagggcccaataccgtaatggtttgtcgtcggaggtgcaggttcaccgtgttgaggctgtggcccgtattggcaccacctataagggtggtaagcgtattgaggcgaagcatggcacgttggcgaggtcgattggggctgcgtcgtgatcgtttatggtgatccgcgtgtgtgggctaaacgcgtgctcaaggatgatggctggctgtctgatataccttgtgtggggacggtgcctgaggatttcagcggtgacttgatttggttggcgttggatggtggcccacagttgcatgttcgtgagcgcgtgtttttgcgggtgaatgtgttttctgatatgccggatcgtgctatgtctttggcgcgtcgtgttgaggccgtccttgttgacggggttgatggtgacccggtggtgttttgtcggcgttctactggccctgatttgctggttgatggtgcacgttttgatgtgtattcgctttttgagctggtgtgccggcctgtcgaatccgagtaagcgtatcgttgtttttttagtttgattgttttttagtttgattgttttttgggggttatgatggctggaacacgtacagcgtctaatgttcgctctgctgttacgggtgacgtctatattggtaaagctcatgccggtgatactattaagggtgttgaggctgttccttccgggcttacagctttagggtatctgtctgatgacgggtttaagattaagcctgagcgtaaaacggatgatttgaaggcttggcagaatgcggatgttgttcgcacggttgctaccgagtcttctatcgagatttctttccagctgatcgagtctaagaaggaggttatcgagctgttttggcagtcgaaggttactgccggatccgattcgggttcgttcgatatttctccgggtgccacgacgggtgttcacgccctgttgatggatattgtggatggcgatcaggttattcgctactatttccctgaggttgagcttatcgatcgtgacgagatcaagggtaagaatggcgaagtgtacgggtatggtgtgacgttgaaggcttatcctgcccagattaataatactggtaatgctgtgtctggtcgggggtggatgacggctttaaaagctgatactcctccgactcctccgccggccccggttcctccgaagcctcagccggatccgaatccgccgtctgagaactgatacacgattttagggattgttgatagatgagtgacacaggttacacgttgaagattggtgaccgtagctgggtgttggcggatgcggaggagacggctcaggctgttcctgcccgcgttttccgtcgtgcagctaagattgcccagtcgggggagtctgcggatttcgcccaggttgaggtgatgttttctatgttggaggctgccgccccggctgacgcggtggaggccctggaggggcttcctatggttcgtgttgccgagattttccgccagtggatggaatacaagcctgacagtaagggtgcctcgctgggggaatagtttggctccacggcctgattgatgattatcgtggggccatcgaatacgatttccgcactaaatttggtgtttctgtttatagtgttggtggcccgcagatgtgttggggtgaggctgtccggctggctggcgtgttgtgtaccgatacgtctagccagttggcggcccacctgaatggttggcagcgcccgtttgagtggtgcgagtgggctgtgctggacatgttggatcattacaggtctgctaatagtgaggggcagccggagcctgtggcgaggccgacggatgagcgtagggcccggtttacgtctgggcaggtggacgatattttggcgcgtgttcgtgccggtggcggggtgtctcgcgagattaatattatggggtgaatagtgtatgtctggtgagattgcttccgcatatgtgtcgttgtatacgaagatgcctggtttgaaggcggatgttggtaaacagctttctggggtgatgcctgctgagggtcagcgttcgggtagtctttttgctaagggcatgaagttggcgcttggtggtgcggcgatgatgggtgccattaatgttgctaagaagggcctcaagtctatctatgatgtgactattggtggcggtattgctagggctatggctattgatgaggctcaggctaagttgactggtttgggtcacacgtcgtctgacacgtcttcgattatgaattcggctattgaggctgtgactggtacgtcgtatgcgttgggggatgcggcgtctacggctgcggcgttatctgcttcgggtgtgaagtctggcgggcagatgacggatgtgttgaagactgtcgccgatgtgtcttatatttcgggtaagtcgtttcaggatacgggcgctatttttacgtctgtgatggctcgcggtaagttgcagggcgatgacatgttgcagcttacgatggcgggtgttcctgtactgtctttgcttgccaggcagactggtaaaacctcggctgaggtgtcgcagatggtgtcgaaggggcagattgattttaacacgtttgcggctgcgatgaagcttggcatgggtggtgctgcgcaggcgtctggtaagacgtttgagggcgctatgaagaatgttaagggcgctttgggctatctgggtgctacggctatggccccgtttcttaacgggttgcggcagatttttgttgcgttgaatccggttatcaagtctatcacggattccgtgaagccgatgtttgctgccgtcgatgctggtattcagcgtatgatgccgtctattttggcgtggattaaccgtatgccgggcatgatcactcgaatgaatgcacagatgcgcgccaaggtggagcagttgaagggcgtttttgcgaggttgcatttgcctgttcctaaagtgaatttgggtgccatgtttgctggcggcaccgcagtgttcggtattgttgctgcgggtgttgggaagcttgttgcggggtttgccccgttggcggtgtcgttgaagaatttgttgccgtcgtttggtgctttgaggggtgccgccggggggcttggtggcgtgtttcgcgccttgggtggccctgttggtattgtgatcggcttgtttgctgccatgtttgctacgaacgcccagttccgtgccgctgtgatgcagcttgtgggtgttgttggccgggctttggggcagatcatggtcgctattcagccactgttcgggattgttgctggcgtggttgccaggttggcgccagtgttcggccagattatcggtatggttgctggtttggctgcccggctggtgcctgttattggtatgcttattgcccggctggttcctgttatcacccagattattggtatggtaacccaggttgctgccatgttgttgcctatgctgatgccggttattcaggctgttgttgctgtgatacggcaggttattggtgtcattatgcagttgatacctgttttgatgccggttgtgcagcagattttgggtgctgtcatgtctgttttgccgccgattgttggtttgatacggtcgctgataccggtgatcatgtcgattatgcgtgtggtggtgcaggttgttggtgccgtgctacaggtggtggcccgtattattccggttgttatgccgatttatgtttcggtgattggattcattgccaagatttatgctgcggttatcgtttttgaggctaaggttattggcgctattcttcgtactattacgtggattgtgaatcattcagtgtctggcgtgaggtctatgggcacggccatccagaatggctggaatcatatcaaatcgtttacgtctgcgtttattaacggttttaagtcgatcatttctgccggtgttgccgcggttgtggggttttttacgcggcttggtttgtcggttgcttcccatgtgaggtctggttttaacgcggcccgtggcgctgtttcttctgcgatgaatgctatccggagtgttgtgtcttcggtggcgtctgctgttggcgggtttttcagttcgatggcgtctaaggttcgtagtggtgctgtgcgtgggtttaatggtgcccggagtgcggcttcttctgctatgcatgctatggggtccgcggtgtctaacggcgtgcatagtgtgctgggttttttccggaatctgcctggcaatattcggcgtgctctcggtaatatggggtccttgttggtgtctgctggccgtgatgtggtggccggtttgggtaacggtattaagaatgctttgagtggcctgctggatacggtgcgtaatatgggttctcagattgcgaacgccgcgaagtctgctttgggtattcattccccgtccagggtgtttcgtgaccaggttggccgccaggttgttgccggtttggctgaggggatcaccggtaatgctggtttggcgttggatgcgatgtcgggtgtggctggccggcttccggatgctgtggatgcccggtttggtgtgcgatcgtcggtgggctcgtttaccccgtacgaccggtatcggcgtgcgagcgagaagagtgttgtggtgaatgttaacggacccacgtatggtgatcctaacgagtttgcgaagcggattgagcgtcagcagcgtgacgctttgaacgctttggcttacgtgtgattgggggtgtggttcatgtttcttcctgacccgtctgatcgttctggtttgactgttacctggtctatggatccgctgtttggcgatgaacgtgtgcttcatttgacggattatacggggtcgtctccggtgatgttgttgaatgattcgttgcgcggtttgggtgttcctgaggtggagcatttttctcaaactcatgttggggtgcacggttcggagtggcgcgggtttaatgtgaagcctcgcgaggtgacgctgccggtgcttgtttcgggtgttggtgtggatcctgtgggcaggtttcgtgacggtttcatgaaagcctatgacgcgttgtggtctgcttttccccagggcgaggagggggagttgtcggtgaagaccccgtctggtcgtgagcgtgtgctaaaatgccggtttgattcggctgatgacacgtttacggtggatccggtgaacaggggttatgcgcgttatctgttgcatttgacggcttatgacccgttttggtatggggatgagcagaagtttcgttttagtaacgcgaagttgcaggattggttgggtggcggccctgtcggcaaggatggtacggcgtttcctgtggtgttgacgcctggtgttggttcgggttgggataacctgtctaataagggtgatgtgcctgcgtggcctgtgattcgtgtcgagggcccgttggagtcgtggtctgtgcagattgatggtttgcgtgtgtcttcggattatcctgtcgagaagtttgattggatcactattgatacggatcctcgtaagcagtctgcgttgttgaatgggtttgaggatgtgatggatcgtttgaaggagtgggagtttgcgcctatcccgcctggcggttctaagagtgtgaatattgagatggttggtttgggtgccattgttgtgtcggtgcagtacaggtttttgagggcttggtgaatagttgatggctggtcttgttccgcatgtaacattgtttacgccggattatcgtcgtgtggcgcctatcaatttttttgagtcgttgaagttgtcgttgaagtggaatggtttgtctacgctggagttggtggtgtcgggggatcattccaggcttgacgggttgactaggccgggtgcacggctggttgttgattatggtggtggccagattttttctgggcctgtgcgtcgggtgcatggtgtgggtccgtggcgttcttcgcgggtgactatcacgtgtgaggatgatatccgcctgttgtggcgtatgctgatgtggcctgtgaattatcgtcctggtatggttggtatggagtggcgtgcagacagggattatgctcactattcgggtgcggctgagtcggttgctaagcaggtgttgggggataatgcttggcgttttccacctggtttgtttatgaccgatgatgagcgtcgtggccgctatattaaggattttcaggtgcggtttcacgtgtttgccgataagttgttgccggtgttgtcgtgggctcggatgactgtcacggtgaaccagtttgagaatgcgaagtttgatcagcggggtttgctgtttgattgtgtgcctgctgtgacacggaaacatgtgttgactgccgagtctggttcgattgtgtcgtgggagtatgtgcgtgacgccccgaaggcgacatctgtggtggttggtggccgcggcgagggtaaggatcggctgttttgcgaggatgttgattcgatggccgaggatgactggtttgatcgtgtcgaggtgtttaaggatgcccgtaacacggattctgaacatgtgcatctcatcgatgaggctgagcaggtgctgtccgagttaggggccacgtcggggtttaagatcgagttggctgagtcggatgtgttgcggtttgggccaggcaatctgatgcccggggatttgatctatgtggatgtgggttctggccctattgcggagattgttcggcagattgatgtggagtgtgattcgcctggtgatggttggacgaaggtgacaccggttgcgggggattatgaggataatccgtcggccctgttggctcgccgtgtggctggtttggctgcgggtgtgcgggatttgcaaaagttttagtaagtgattggggtttgttgtgggtattgtgtgtaaagggtttgatggtgtgttgaccgagtatgattgggctcaaatgtctggtctgatgggtaatatgccgtctgttaagggcccggacgattttcgtgtcggtacgacgattcagggtgccacagtgttgtgtgaggtcatgccggggcaggcttgggctcacggggtgatgtgcacgtcgaatagtgttgagacggtgacggggcagcttccgggcccgggtgagacccgatacgactatgtggtgttgtctcgggattgggaggcgaacacagccaagttggagattgttcctggggggcgtgcggagcgtgccagggatgtgttgagggctgagcctggcgtgtatcatcagcagttgttggctactttggtgttgtcgtctaacgggttgcagcagcagttggatcggcgtgctatagcggcccgtgtagcgtttggggagtctgcggcttgtgatcctacccctgtggagggtgaccgggtgatggttccttcgggggctgtgtgggctaatcatgccggcgagtggatgttgttgtctccgcggatcgagacgggttcgaagtcgatcatgtttggcgggtctgctgtgtatgcttacacgatcccgtttgagcgccagttcagtagtccgcctgtggtggtggcgtctatggctacggcggctgggggcacgcagcagattgatgtgaaagcctacaatgttactgccaaggattttggtttggcgtttatcacgaatgacgggtctaaaccgaatgatgtgcctgcggttgcgaattggattgctgtcggcgtgtaatgcgcggcttgcgggtatgtgacatgttgtggtggttgtagtggtagggggctgtagtgtcatggcttacacccacactcgtagcctctatttgtaccgctatcgctactgtccttggttcgattcaggcggctacgtacaggtcgaagaagaggcttaggcagttgtctgcgcaggttgatgcgatggaagaatacacgtggaatattcgccatattgttcatcgctataacgcgaatctaccggagaatgttgagcctgtaaagatgcctgatttgcccgagtttttgaaggatactgttgatggtggtggggggtgaattgtgagggagttggaggaagagaagcggcagcgccgctcgtttgagaaggcttccctgatactgttgttcctgtcgcttgtgctgttggcggtggttgctgggggtgctttacgtttcggtgctgtggcttcccagcgggattcggagcaggctaaagcccagtcgaatggtacagccgctaaagggttggccagccgtgtgcggcaggtgtgtgcctctggcgggcaggagtcggtgcgtcttcaccggtctggcttgtgtgtggatgctcagcgtgttgagcgtagcgtgcagggtgtgccgggtcctgctggtgtgcgcggcccgcaagggcctgcaggggttgacggccgggatggtgttaatggttcagctgggctggttggccctgttggtccgcagggttccccgggtttgaatggtgtgaagggtcctgacgggctgcccggtgctaacggcaaggatggtgttgccggtgtgaacggggctgatggccgggatggcgtgccaggtagggatggcgctgatggggctgatggtggccgtggccctgttggtccccctggtgtagccggtgcacagggtgagcgtggccctgttgggcctcaggggccgcagggttctgccggtgccgatggcaaggacggtaaagatggtaaggatgggcgctcggtggtgtctgtgtactgttccgggggccgcctggttgtgaaatatagtgacggtacggcctctaccatagcgggttcggtggcctgccagggtgtgaaaccatcaccggtggttaccgtatcatcccacaagtaaaagaggaagggtgttactagtgttgatagtagtgtttgggggtggcgtgttgtgagatacattccagcggcgcatcactctgccggatcaaataagccggtgaaccgtgttgtgattcacgcgacatgcccggatgtggggtttccgtctgcttcccgtaatgggcgggcggtgtccacggcgaactattttgcttccccatcgtcgggtggttctgcccattatgtgtgtgatattggggagacggtgcagtgcttgtcggagtcgactattggttggcatgccccgccgaatccgcatagtttgggtatcgagatttgcgcggatgggggttcgcacgcctcgtttcgggtgccggggcatgcttacacgagggagcagtggctggatcctcgcgtgtggcccgccgtggagagggcggctgtcctgtgtcggcagttgtgtgacaagcatggtgttccgaaaaggaagcttagtgcagccgatttgaaggctggcaggcggggcgtgtgcggtcatgtggatgttactgatgcgtggcatcagtcggatcatgacgatccggggccgtggtttccgtgggacaggtttatggccgttgtcaacggcggtagtggtagtgaggagttaactgtggctgatgtgaaagccttgcatgatcagattaaacaattgtctgctcagcttactggttcggtgaataagctgcaccatgatgttggtgtggttcaactacagaatggtgatttgggtaagcgtgttgacgccttgtcgtgggtgaagaatccggtgacggggaagctgtggcgcactaaggatgctttgtggagtgtctggtattacgtgctggagtgtcgtagccgcatcagtaggcttgagtcgactgtcaacggtttgaaaaagtgatggtggtttgttgtgggtaaacagttttggttgggcttgtttgagcgtgccctgaaaacttttattcaaacgtttgttgctgtgttgggtgtgacggcgggtgtcacgtatactgcggagtcgtttcgcggtttgccgtgggagtctgccctgattacggccacggttgctgcggtgctgtcggttgctacctcgtttggtaatccgtcgtttgtggccggtaagcctaaaaccacggttgtggatgctgggcttgttccacccgacgatgggggcatggttgagccgcacatggttgatgtgtcggatcctggcatgatcgagcctgtcgatgatgcggatgttgccggctatgagcctcggcgtgcagccgagtcggaggttggcacggtagagcctgattgaatgataagtgaatatgtgtgtgccccagcggtgctgccacgatcgtgtggtggttgccgctggggcactatttttgtgtctacaggggttttacaggttgtcgtctagtgtgtcttcgagcatctggtccaggtggaggcaggcggagatagtatcgttggcctggtctagaacgttccggccgataacatttttgtggttgtcgcggtgactgatgatagactgcatgatatcttcggcctccacgtgcagtagtttggtttggtatgcgattccggcgagccagtctagtgcttcctggcttgcataggggctctggtcctcgctgttgtcacgggtgttgctgttgtttgggtgtcctgcactgtcgcaaaaccacaagatttcgctgcactcgtctagcgtgtcctggtcgatagtgagatcgtcgaggctgacttcgttaacagtaaggttcacattgtcgagtgagatgggtacaccgtactggttttcgacaccgccaacaatgttttccaattgctgcatgttggtgggctgttgttggatgattcggtgtaccgctgctttgagggcagtgtgggggatattggttgtgttgttcatcgtgttatgccattccttcattatcgtctggcatgtagtatgtgctgtttgcgtactcggttaacgtcatcagtgtttggtctgcccactgtttcacggtttgtcgggtgactccgagccggtgcgccgcggcggagtatgtttggtcatacccgtatacttcacggaatgctgccaacctggctagccgtttcctctgtttggatggctggcaggtgagggtgtagtcgtcgatggctagctgtagatcgatcatggtgacgatgttgttgccgtggtgttgtggcgcggttggtgggggtggcatgcccggctccacactgggtttccatgggccgccgttccagatccattgtgctgcttggatgatttctgcggtggtgtaggttcggctcactggtcatcccctgaataggttgtcgaggttgtctgggttgctggtgttggtggtgtcgaatcgtcccacgcagtggcagtagtcgtacatgagtttgataatgtgttggtggtcgccgaggtaggtgtttccgctgatgctgtaggtggctgtgccgtcttttgcgatggtgtatttggcggtgatggtttcgggtgtttcggtgttggtgatgattgctgtggtggtggtgcctacggtttggagtatggtggtttgggttccgtcgtcgaggatggttttaaccatggtgtgtgttctccctttgtgttagttgcttgtctggttgtcggctagatgaataatatcggataaaggtttcggctggtctaggtgttgtatggttttgttggctagccgtttggctaccctgtagcacattttggtatagtgtttgttgtctaggttgtggtattgttcccgcaccgcaatatatagtagggagtcttggtacaggtcgtctgcgctgattgcggggtagtgtgtggctattttggtgcatgcccggttgagtgtgcgaagatgatggtctgtggcccatccccacgatgcggtggtggccaggtctgcttttgttggtcgtctgctcatggcactatttcatctcgctatctggtagttgtttggtgttttgttgtggatagtgtagcacactagtccggggtggccggtggtgcctgtgcggtgccggtaccagacggattcgccttccatggatgggcattggatgaaggtgcgttgtccttgctcggatatttctaggtggtgccggtgccctgccatgaggatgtgggatgtggtgccgttgtggaattcttggccgcgccaccattcgtactgtttgccggttttccattggtgcccgtgggcgtgcaggatttgtgtgccggccacttcaacggtggtggtcatttcgtctcggctggggaagtggaagtgaaggttggggtagttgttgttgagttggtaggcttctgcgatggcccggcagcagtccacgtcgaaggagtcgtcgtaggtggtgacgcctttaccaaatcgtactgcttcaccgtggttgccggggatggatgtgatggtgacgttggcgcagtggtcgaacatgtggacgagttgcatcatggccatgcgggtgagcctgatttgttcggtgaggggtgtttgtgtgcgccaggcgttgttgcctccttgtgacacgtatccttcgatcatgtcgccgaggaaggcgatgtggacccgttgcggtttgcctgcctgttgccagtagtgttttgcgactatgagggagtgcaaatagtcgtcggcgaagtgtgctgtttctccgccggggatgcctttgccgatttggaagtcgcctgccccgatgacgaaggccgcagtgctgtagtcggtgtgggtgtcttgttcgggttttggtggctgccattcggctagtttgttgacgagttcgtctacggggtaggggtttgttgcgggttggtggtcgatgattttttgtatggatcggcctgtttctccgttgggtaaggtccattcggagatgcgtgtgcggcgtacagtaccgttggctagattgtcgtcgatggtgtcgatggcgttgtcgtggttggctagctgtgtgagtagccggtctatattgtctatcactggttttcctcttctgtttgtggggtggtgttggcttgtttgcggcgatagtctttaatgacggtggcggagatggggtatccggcttcagtgagcatttgggctagctgtgtggcggggatggttttgtcggcgaggacgtctgcggctttgttgccgtagcgttggatgagggtttcagttttggttgccatgatgtcctaggggttgtgtggtgggctgccatcctgtgcggcagtcgccgtcgtgtcctggtttgcgtgtgcaccatgagacttcgccggcattgtggatgatggcacggccgcatatgacgtcatgtaggtgttcgggaaacttatcgttgttgttgtccccgtacatgtcgatcaagtgttgggttttagtaaccatcatgtctcctatgtgtgaaagagtgtgcaaatactatgcttgtgtcatggatgtttatgcgggtatggttttcatcaccttgctgaacgttacttggttactgtacatcatctgggtgatttcctgatccgttttgtcggggtgctgttttcgcaggtttgcccattggcaggcgttgtcggtttcttgctggagccgggtgagattgttttcggtgatgatttgtttccacattgtccacgagacgtcgagtcgtttgagcatgtcgagggctggcacgttgaactggtcgaggaagagtatttcctccgtgtagtactgtttttcgtattggtcccatccgcttcggtgtctgttgggctggtttttggggtaggcttcccggcatactttgtgcaaacgtttggccatgtctttgggtagcctaatgtcggggttggcgcggatcatggatcgcatcccatcataggtggtgccccaggtgtgcatgatgcggagtgggtcttcaccgtcggcccatttttctgcacagattgcgaggcggatgcgtctcctggcggctttgctggtgttgcgccggccggggatggggcacgtgtcgagggggtccatgatgttttctatgcctttcttggagtgatgttttgtttgtctggttttattgtagcactgtgtctagtgcttgtgtcaaccctgttttgcctgttttcaggtaggtgtctgtgacatccccgacagtgaggggtacgtgtatggcttgggggagtgccgtctggagggtttgggccatctggtctcctgctttgtcggggtcggaccagatgtagatgcggtcgtagccttcaaaaaatttggtccagaaagtttgccacgaggtggccccgggtagggctacggccgaccatccgcattgttcgaggatcatggagtcgaattcgccttcgcaaatgtgcatttcggctgcagggttggccatggcggccatgttgtagatggagcctgtgtcccctgccggggttagatatttggggtggttgtgggttttgcaatcatgctggagtgagcagcggaaacgcatttttcgtatttcggctggctccccccagacggggtacatgtaggggatggtgatgcactggttgtagtcttcgtggcctgggatggggtcattgtcgatgtatccaaggtggtggtagcgggctgtttcttcgctgatgcctcttgctgagagcaggtcgagtatgttttcgaggtgggtttcgtagagggccgaggctttctggattcggcggcgttccgcaatgttgtatgggcgtatactgtcgtacattcgggtttctttcttctaatcgttgttgtagctggttgagtccgcctccgacaccgcatgtgtggcagtaccagacgcccttgtcgaggttgatgctcatggagggctggtggtcgtcgtggagagggcagaggatgtgttgctcgttcctggacggattgtagcgtatgtggtagaggtcgaggaggcggcaggtgtcagaggtgtgggaggagctcgttgagggttgataccacataggcttcactccagggcttgttgcgctgttttatcactacgagtccgatggcggattggttttgtttgtttcggtgtgtttcgtagttgcgtgcctcccggctggcttgtttcacgaattcggcgaggtgtggctgcccggctttcgcctcgataatgtaggttttgtggccggttgtgaggatgaggtcgccttcgtcttcgcggccgttgaggtggaggcgttctatatcatggccggtgtcgcgtagctggtggaggagtcgtgtttcccattctgcgccggctcggcggttgcgtgactgttgtgttgacatgatagtcctttgtggtgttcggtcatgttccatggctgtttttcggcgagtggcccgaagaatgtgtattcggggtaggctctgagtcgttcgtatcgggtgccgtcggggctggatttgcctgtgcgctgtttgagtacggcgatgcgtgcctcggcggggatggtgagcccgttgccgttgtcttcgccaccatacagggagactcccaatatgagttgtggtttttcggagaggccgtttttgatttcccgcctagccggggggtgttcgatgtcggagccggttttgtcggtggcgtggtgggtgacaataatggtggagccagtatccctacccaatgctgtgatccattgcatggcttcctgttgggcctggtagtcggattcgcagtcttgaatgtccatcagattgtcgataacaatgagtggtgggaaggtgttccacatttccatgtaggcttgcagttccatggtgatgtctgtccatgtgatgggtgactggaatgagaatgtgatgtgttggccgtggtggatgctgtctcgatagtattctggcccgtagtcgtcgatgttttgttgtatctgggcggtggtgtgttgggtgttgagtgagataattcgtgtggaggcctcccagggtgtcatgtcccctgatatgtagagggcgggctggttgagcatcgctgtgatgaacatggctagcccggatttttggctgccggaccgccccgcgatcatgaccaaatcccctttgtgaatgtgcatgtccagattgtcatacaagggtgctagttggggtatgcggggcagttcggcggctgtttgggaggctctctcgaaggatcgttggagagagagcatcggagccttaatctatctgtctatcggttggatgatgttttggtggtcagatggagtcgatgtcgatgtcagcatcagttgaggctgtggtgtcgtctagctggccgttatcgcgtttgtctacgtattcggcaaccttatcgtagatggcgtcgtctaatggtttgagcacgaccgcgttgaacccgtttttggtgcgcacggtggcgagtttgaatgcctgttcttcgccaaggtaggcttctaggtcgcggatcatggagtgtgggcggtcgttgttgccgcgggctttctcgataatggcgttggggatggtttctggggtgccgttgttgagatcgtctagggtgtggaagattgtgacatcagcgtagatgcgatcggcgacctgtccaccgtagccttcggtgttgtgctggacgtcgtggattttgaaggcgatggcggtggcgtcctggtttcgggacgggttgaagaaggtgctgttgctgttgttgcggtagtttgcgagtcccattgttgtttcctttactgtttgtgttgttttgtttgttggtttgtgtcggtttttatcgggtgaggctgtttcgtttgctgcggaaagcctcagacacgtcactgttactagtgatggtcttcttgtactgtttgaggaggtcggctagctgtgccttgcttgtggcattgttaattttgtcgatgatggtgttgtttccttctgaggcgatgttgtctacgtagtctttggctgcctggttgtatcggtcttggaggatgatggatgctgtggcgatcagtgttgccaggtcccagttccgtgccgcggagctgtttttgagtccgcctagcaggtcgatgatagccttctttacctggtcggcggtgtctccgcggatgacggtccatggggcggcgtagtcgcctccgtatttgagtgtgacggtgaatcggtcgtcgtctgtgttgtcggtcactggtgctccttgccttcttttgttggggctgtgatggtggtttctatagggtacctgtaggcgtctttcccgttaacagcccagcaggcgtccttgacggggcatcctttacagagtgctgtgacgtggggtacgaagatgccttcgctgattcctttcattgcttgactatacatggatgatacatgccggtaggtgttgttgtcaagatcgtagagttcggtggatgtgccctgttcgaccgattgctcgtctcccttggtggtggcgggtgtccaaaacatgcctttcgtcacatcgttgccgtgttgggcgagcatgtaccggtatgtgtgcagctgcatactgtcggcgggtagacggccggttttgaggtccaaaatgaaggtttcgccagtgtcggtgtcggtgaagatacggtcgatgtagccaacaatcttggtgccgtcgtcgagggtggtttctaccgggtattcgatgcctggctggccgtcaataacagcggtgatgtattctgggtggttgcgcctccatgttttccaccggtccacaaaggtggggccgtatatcatccaccaattgtagtctttcttgtgtggcccgcccgactcgcacatgtttttgcacaccctgccggagggtttgatttcggtgccttcggattcagcgagggcgacttgggtgtcgaaaatgtttgtgaaggatgagagtttgtctggcagtgcagggtattcgtcgggattgtacaggtgtaggtcgtattgttcggtgatgtggtgtatggcgcttccggcgatggtggcgtaccaggtgtggtgttggacatggtacccgtgggataggcgccatttttctccgcattcagcccactgtgacagtgatgagtaggagatgtggcctggatggtgtatggttttcgggtattgtgctaggggcattacttgtcgcttttgttccatgggttgcgggtgtcttggccggcatcgtgttgctggtaggcgaggagtgcgaggcagtgccaggcagcatgggccaggtggggtagcccggattcgtggtcgaggttgttgccttgctgccatgatagtaggtgccggtagagggcgtcgacactgtggctccacgggtatcctccggtccagttgttgtcgccatatttggtggcgccgtagcctgccacggagccgagggcgtgtaaggctgtggggtcgatgagggatagcctgcaaagtttgagttcttttcgggcaccggtgttggggtcggtgtacatgcgggttggcttatccatggggtgtgtgctccttagaggtgggttactggttggggttgtgggcgagggcgacggcgagaataatgatggcgagggtttcagcaataagtatgggtgttgtgatcatttagtgtctcggggattgttggtgagtgtggaggcacccaggagggtggcgagggcgcatgcggcaataatggcgagggcggctttgtggctggtgccggttgcgtacatccatgtgatgatgccgccttggatccaggctaggctggtgaagaacgtttcgtagctgtgtagctcaatgttgttgttgagtgtgttcatgcttgctcctgaagaatggtgttgatggttttataaatgttgtacaggtcggtttcaatagataacagttggtggatttcgtggtcgagatcaatgtctgggttgagggtgttgatgcgggaggcaatatcggtggctgtgcgtagtgtgccgccggtgtggtgaataatgtgtgccgtgtcggcgagtccggtggtgacagcgtagtgggataggagaggcatagcgggggaatgctccttggcgggttactgttgcgggttgatgttgaggtcggtgacgtgcgggtggtcttctgttccggtgacgaggcagtggacggtgactgggagtttggatgcgccgggctgtttcgcggttgcgccgtagatgatggagaatgtgtctttaccgatggttttgtggagttggaggtcgatgtcggggttgccgttccagttgacgccgtgtgcggcggcctgttgtgcggctttcttgttgcaggtgtgtgctgccgtgatcatggtgagtccggtggcggtttcttcaccccttgcttgggcttgcttgtgggctttccgctgttcggctcgcagtgactgttctgcggctgcctggcgggctttcttttcggctttgcgctgccggacggttttgggtgtccattcggtgttggctgtggtggcctgtggggctggcatgaatgaggcggcggcgatgatggcggctgtgatgcctgcgatggtgtatccgtttttcttgttcatgactttgtgttcccctttccggggtgttgttcgttgctgacataattaatcatggtgtgggcggtggtctgtgtcaaggctgcgctcaacgattgtgagcgattcgtgtgtggctaggggttttatcggctgtacagggtgagtaggtggccaacattgatgcggctcacattccagtagagttgcgtggcttcacccccggtgagtggcttccactcgttgtggctgaacacggttccatcggatgctatgaatgtgttggggcgtagcttgtggagttcggcttccacgctctgccggtaggcttcggcgaggccctcaaaatccatgtggtcgcaggataggttttcgaggcgtgtcaggtcgaagggtgtggggcagtcgtagctggcgggggtgtagagctgggtgaagtggttggcgatcttctgcataattatgtccttttcgttgcttataacgttgttgagggtttatcgggtggatgcgacaaggatggcgtctacgtcgatcatgtcgatgagatcgtggagttcctcggcctcattctcggagaggtggcgccagtcgtagtcgccgtacacggcgccgtcgagggtgacagtccacagaggccggatgagtcgtatggcttcttgtactttagcgtggtacatgcggcgcaccatatccagatccatgtcgtctgaatggtttccgatgaggctgtggaggctgagtgggtcgatttctgtctgcctgtagaggctggtgaatgatggtgtgatgagtgtgccatccatgagggtgtgctcctttcggtggtgtaggggttgttgtggtttctagagtgtgcgggctgcgaccccatagtcaaggctgcgctcattcggattgagcgtttcatgctggagtgtcgggtgtgacagatgtcactgaagtctttattgcctctcccagcgtctcaaatcttctaggggtaggattatatagggttgaccctgctgatcgattctagggcccttcgagggcgtatcaggggtatgtctaagttatggcaggtgtggcagagtattgagtgagtcaaagtgccgagcttagacataagatctatcatctaggtgtgtgagatgtatcacactctcctggcttggtgtgcaccctcaaggccactctgccaatctggcgtgaagggtgtagcccagaaataccgtttaaagccttcacacggcgcctaggagcgccttacagggtgggggctaggtattcatacccccaagcaattctgatcgattctagacgcctcccagagcctcatacgcgatcagccatctcggcatagaccaccagcccctatcctggttagctaagcctcaactatgtggacagtgtgggatactgtgggggaagaaggacgcggtacaagaaagagggggggagcatcagccttagggtcttagcactgatgggcttagcaccgagcccctcaagggctcggcatcagcctgacagcccgagcaggctcagccgatcaggcacagcactgaaaggagtacacgccatcagggaaggcttgagagtacgaggagccctagcgacgagtactcgaaagcctgagggaacacccatcagcactgatgggcctagcgtgttcggaaaggacacaggggtaaggtgtgacagctgtccgggagtgaaacccgttctgactaggggtttcagccttaaccaccctcaaaggttacaagactctaagaaaatttaaggaaaagtttaggtttaatttttggacctttactaccaaaaacacccgtttacacccctcaaacccgcctatagagccaaaaccaccagtttgactcatcccaggtggggtatgataggctggacaggtagccagctggacgcaaggccggaaagtgctaacgcacttcccaacctcgcttaccatcagtctaccaaacactttaaagattcaaggcttagcgctaagcccttaagaccttaacgctgaacaccgagcccctcaagggctcggcatcagttttaaagccttaaagtcttaaagtacatatataaccttaacagttaaacgttaaaagctttaagccttaacacctaagttaagtataaaaccttaaaggctaagcacttaaggatataaactttacatcagtgtttaagactttaaaacttaaaataactattaagactttaaagcttataagctttaaacacttaaagtaactataaaacattaaagaccttaagtacttaaagttaaacatcagtcttaaactttactatgataacctataagtcttaaagcttataggtataataatataatataagtattaaagcttataagttataaaagttttagaagagttaaggggttaacttctttacttctcttctctctttggttcttcctctcttctcttcttttcttcatcaggggagaagaggaacctttaaccgtcaacactgatggactttcaaccgtgtgtctcgtgtaccaccggtcgcacgctcccggtttgtacattccccacactctgacacccgtgtccctttacggcttggcgtgttcggctgaaggcgtacggcgtgtcacgccaacacccttaacaccgggtaagacttaaagtgcatattatatgtagaagactttaaaaacctgtcaggtgttcccgttgagcctgtgtcctacaccgctaagtattaagtgctaggcgccaagcggtaagctgtgaaacgcgaacacccacccccctttttctttcgtgtccttctctttttgacacagctggggggcgatgtgatctttttcacacccatggggggtagtggagaaaacaaccaccccagcaagttcaagacaccccctcaaacgaacaaaacagcccccagaatcgaacagcagggcaagggcaaggtattcatacccccaacggttcccaagcccttagagaggcaatgagaggctcgcaggggtcataggagatcgggggacgtgatggcacacaccaaccgcaccgcatcctccgcccatcggcgctggcgggcaagactcatcacccaagcccgacaacaaggccaaaccgaatgcccactctgcggagcccagatagcctggggcacacatgacctgccaaccagccccgaagccgaccacatcacacccgtcagccggggaggactcaacaccctcgacaacgggcaaatcatctgcagaacatgcaacagaagcaaaggcaatcgcagcgaaccaaacattcaattccaacaacaaaccacaaaaacgttgattccatggtgaaaaacctgtcaacccccaccggggacaccccctgcacacccgtgcaagacc

SEQ ID NO: 37 - DNA, 29464 bp, Bacteriophage of P. acnes
agtgaaatacctcccttttgttgttttatcgttttgtcgacatttcttgttctgtgtttggtggtgttgatggtgcagcctgagcttcctgagggacatgagtggtgtggggagacgcgtcattggtggcgtgtgtggggtgaagatgcgcgtgcccagtttgtgtctgatgaggagtggctgtttctccttgatgctgcggtgattcatgatgtggtgtggcgtgaaggcagggcggaccttgtggcttcgcttcgtgctcatgtgaaggcgtttatgggcatgttggatcgttattcggttgatgtggcgtctggtgggcgtggcgggggttctgctgtggcgatgattgaccggtatcggaagcgtaagggggcctgattaggtgtctggtgttgttggttctcaggttcctcgtcatcgtgttgctgcagcctattcggtgactgctggcggggatgctggtgagcttggtagggcttacgggttgacgcctgatccgtggcagcagcaggtgttggatgattggctagcaatcggggctagtggtcggcttgcgtctggtgtgtgtggggtgtttgtgcctcgccagaatggcaagaatgctattttggagattgtggagttgtttaaggcgactattcagggtcgccggattttgcatactgctcacgagttgaagtcggcccgtaaggcgtttatgcggttgaggtcgttttttgagaatgagcggcagtttcctgatctttatcgtatggtgaagtcgattcgtgcgacgaatggccaggaggctattgtgttgcatcatccggattgtgccacgtttgagcgtaagtgtggctgtccgggttggggttcggttgagtttgtggcccgttcgcgtggttcggctcgcgggtttacggttgatgatttggtgtgtgatgaggctcaggagttgtcggatgagcagttggaggcgttgcttcctacagtaagtgctgccccgtctggtgatcctcagcagattttccttggcacgccgcctgggccgttggcggatggttcggtggtgttgcgtcttcgtgggcaagcccttggtggcggtaaacgtatcgcctggacggagttttcgattcctgacgagtcggttccggacgatttatcaaggtcttggcggaagttggcgggtgacacgaatccggctcttggtcgtcgtctgaatttcggtacggtgtctgatgagcatgagtcgatgtctgcggcggggtttgctcgggagcggcttggctggtgggatcgtggccagtctgctgcgtcggtggttcctgctgacaagtgggcccactcggcggttgatgatgttgagcttgttggcggtaaggtgtttggtgtctcgttttctcgttcgggggatcgggttgctttggctggtgctggccggactgatgctggtgttcatgttgaggtgattgatgggctgtctggaacgattgttgatggtgtggggcagcttgcggattggttggcgttgcgttggggtggcacggatcggattgtggttgccggctcgggtgcggtgttgttgcagaaggccttgacggatcgtggtgttccgggccgtggcgtggtggttgcggatactggggtgtatgtggaggcttgtcaggcgtttcttgagggtgtgcgttcgggtgttgtgtctcatcctcgtgctgattctcgccgtgacatgttggagattgctgtgaggtcggcggttcagaagcgtaaagggtctgcgtggggttggggttcctcgtttaaggatggcagtgaggttcctttggaggctgtgtctttggcgtttttgggggctaaacagttgaggcgtggccgtcgtgatcgtggtggtaggaagcgggtgtctgtggtatgaactcggatgagctaaatctgattgagggcatgtttgatcgtatcagggggttgtcttcgtggcattgccgtattgagggctactatgagggttctagccgggtgcgtgatttgggggttgctattcctcccgagttgcagcgggtgcagacggtggtgtcgtggcctggtatagctgtggatgctttggaggagcgtctggattggcttggctggactaatggtgacggctacggtttggatggtgtgtatgctgcgaatcggcttgctacggcttcgtgtgatgtgcatcttgatgcactaatttttgggttgtcgtttgtggctgttattccgcaagaggatgggtcggtgttggttcgtcctcagtcaccgaagaattgtactggccggttttctgccgatggttctcgtctggatgcgggtttggtggttcagcagacgtgtgatcctgaggtggttgaggcggagttgttgttgcctgatgtgattgttcaggtggagcggcgcgggtctcgtgagtgggttgagacgggccgtatcgagaatgtgcttggtgcggttccgttggtgccgattgtgaatcgtcgccgtacttctaggattgatggccgttcggagatcactcggtcgattcgtgcttacactgatgaggctgtgcgcacgctgcttggacagtctgtgaatcgtgacttttatgcctacccgcaaaggtgggtgacgggtgtgtcggctgacgagttttctcagcctggctgggttctgtcgatggcttctgtgtgggctgttgataaggatgaggacggtgacacgccgaatgtggggtcgtttccggtcaattcgccgacaccgtattcggatcagatgcgcttgttggcgcagttgacggcgggtgaggcggctgttccggagcgctatttcgggtttattacgtctaatccgccttcgggtgaggctttggctgctgaggagtcgaggcttgtgaagcgtgctgagcggcggcaaacgtcgtttggtcagggctggctgtcggttggttttctggctgccagggcgttggattctcgtgttgatgaggcggacttttttggtgatgtgggtttgaggtggcgtgatgcttcgactccgactagagctgctacggctgatgctgtgacgaagcttgttggtgccggtattttgcctgcggattctcggacggtgttggagatgttgggtttggatgatgtgcaggttgaggctgtgatgcggcatcgtgccgagtcgtctgacccgttggctgcgcttgctggagctatttcgcgtcaaactaacgaggtttgatggatggtttcgggtgtgatgtcgaggctggctgcgactgagtatcagcgtgaggcggtcaggtttgctggaaagtatgcgggctattatgccgagctgggtcgtttgtggcattctgggaagatgagtgacacacagtatgttcgtctatgtgtggagttagagcgtgccggtcattatggttcagcagcgctggctggcaagtttgtttcagattttcggaagcttaacggtgtcgatcctggtttgatagtgtatgacgagtttgatgctgccgccgctttggctaggtcgttttcgactatgaagattcttaatagtgacccggatagggcgaatgacactattgatgcgatggcggccggtgttgatcgtgccgtgttgaatgctggtagggatacggttgagtggtctgcgggtgcgcagggccggtcgtggcgtcgtgtcacggatggtgatccgtgtgctttttgtgccatgttggctacgaggtcggattatacgaccaaggaaagggcgctcactacgggtcatactcggcgtcataagcgtggtggtaagcgcccgtttggttcgaagtatcatgatcattgtgggtgtacggtggttgaggttgttggcccttgggagccaaatagggctgatgccgagtatcagaggacgtatgagaaggcccgcgagtgggttgatgatcatgggttgccgcagtcgcctggcaatattttgaaggctatgcgtactgttggcgacatgagataaatggtttccggttgtgcgccgccggttatcggtgtacgggttgtctcccgcacggggggcggcaagattggtgttgttttccgcaaggagtgtagggttaggctatggccgatcagaatgttgaagaacagaatgtcgacaatgatgttgtggagtccggaaaggataatggcattgttgatacagtaaaagacgatggcgggcaggatgtagccgacaatcagttgaagaatgaaggcgagggtaaatcgtctgggactgattggaaggctgaggcccgtaagtgggagtctcgtgctaaaagtaatttcgccgagttagagaagcttcgcgcctcggatggtgatgcggggtctactattgatgagcttcgccgcaagaatgaggaactcaaagaccggatcaacgggtttgttcttgagggtgtgaagcgcgaggtggctgccgagtgtggcctgtcgagtgatgcgatcgctttcttgtcgggtggcgataaggagtcgcttgccgagtctgcgaaagctttgaagggtttgatcgaccatagtagtggtggcgcgggtgtgcgccgtcttgcggggagtgcccccgttgatgatgttaaacgacgtgagggtgtcgcgtttgtggatgctcttgtcaataattctaggagatgatttgtgatggctgacgattttctttctgcagggaagcttgagcttcctggttctatgattggtgcggttcgtgaccgtgctatcgattctggtgttttggcgaagctgtcgccggagcagccgactattttcgggcctgtgaagggtgccgtgtttagtggtgttcctcgcgcaaagattgttggtgagggcgaggttaagccttccgctagcgttgatgtttctgcgtttactgcgcagcctatcaaggttgtgactcagcagcgcgtctcggacgagttcatgtgggctgacgccgattaccgtctcggtgtgttgcaggatctgatttccccagccctgggtgcttctattggtcgcgccgttgatcttattgctttccatggtgttgatccggctaccggtaagcctgccgcggctgtcaaggtatcgctggataagacgtcgaagacggttgatgccacagattctgccacgaccgatctggtcaaggctgtcggtttgatcgctggggctggtttgcaggttcctaacggtgtcgccttggatcctgctttctcgtttgcgctgtctaccgaggtgtatccgaaggggtctccgcttgccggtcagccgatgtatcctgccgccggtttcgcggggcttgataattggcgtggcctgaatgttggtgcttcttcgactgtttcgggtgccccggagatgtcgcctgcctctggtgttaaggctattgttggtgatttctctcgtgtccattggggtttccagcgtaacttcccgatcgagctgatcgagtatggcgatcctgatcagactggtcgcgaccttaagggccataacgaggttatggttcgcgctgaggcggttctgtatgtggctatcgagtcgcttgattcgtttgctgttgtgaaggagaaggctgcaccgaagcctaatccgcctgccgagaactgatttattgttgcggtgatgtgtacatgtgcagggggtggtgttgatgggtatcattttgaggcctgaggatattgagcctttcgccgatattcctaaagataagcttgaggcgatgatcgctgatgtggaggctgttgctgtcagtgtcgccccctgtatcgctaaaccggatttcaagtacaaggatgctgctcgggctattttgcgtagggcgttgttgcgctggaatgatactggcgtgtcggggcaggtgcagtatgagtctgcgggtccgttcgcccagactacacggtctaatacgcctacgaacttgttgtggccttctgagattgctgcgttgaagaagttgtgcgatgagagtggtggcgccggtaaagcgttcacgatcacacccacgatccgtggtggatatacacattctgaggtgtgttctaccgtgtggggtgagggttgttcgtgcggatctgatattaacggctacgatggccctttgtgggagatataggatgactggttttcctttcggtgagactgtggtgatgcttcaaccgactgttcgtgtcgatgatcttggcgacaaggtggaagactggtctaagcctgtcgagactgtgtaccataatgtggctatctatgcttccgtttcgcaggaggatgaggcggcaggccgtgactcggattgggagcattggacgctgctgttcaagcagcctgtcaagggtgccggttatcggtgtcgttggcgtattcggggtgttgtgtgggaggctgacgggtcgcctcttgtgtggcatcatccgatgtctggctgggatgctggtacgcaggttaatgtgaagcgtaagaagggctgataggtagtggctcagaatgtgaatgtgaagcttaatcttcctggtatccgtgaggtgctgaaagcgccgggtgtgcaagctatgttggctgagcgtggcgagcgtgtgcggcgtgccgccgcggcgaatgtgggcggtaacgctttcgatagggcccagtatcgtggtgggttgtcgtctgaggtgcaggttcaccgtgttgaggctgtggcgaggattggcaccacctataagggtggtaagcgtattgaggctaagcatggcacgttggcgaggtcgattggggctgcgtcgtgatcgtgtacggtgatcctcgcgtgtgggctaaacgcgtgctcaaggatgatggttggctgtcggatgtgccgtgtactgggactgttcctgaccggtttgagggtgacctgatttggttggctcttgatggtggcccggagttgcatgttcgtgagcgtgtttttttgcgtgtgaatgtgttttcggatatgccggatcgtgctatgtcgttggctcgccgggttgaggctgtgctgtctgacggggtggatggggatccggtggtgttttgtcggcgttctactggtcctgatttgttggtggatggtgcacgttttgatgtgtattcgttgtttgagctggtgtgccgtcctgtcgaatccgagtaaacgttttgttttgatattgttttaattgtttgtttgatattgtttttgggggttgtgatggctgctacacgtaaagcgtctaatgttcgctctgctgttacgggcgatgtctatattggtgccgctcatgctggtgacactattgatggtgttgggaagattcctgacggtcttaccgcactgggttatctgtcggatgacgggtttaagattaagcctgagcgtaaaactgatgatttgaaggcttggcagaatgcggatgttgttcgcactgttgccaccgagtcgtctatcgagatttctttccagctgatcgagtctaagaaggaggttatcgaactgttttggcagtcgaaggttactgccggagtcgattcgggttcgttcgatatttctcctggtgctacgacgggtgttcatgccctgttaatggatattgttgatggggatcaggttatccgctactatttccccgaggcggagcttgttgatcgtgacgagattaagggcaagaatggcgaggtttacgggtatggtgtgacgttgaaggcgtatcctgcccagattaataagaagggtgatgcggtgtctggtcgggggtggatgacggctttaaaagctgatactcccccggttcctccgaagcctcagccggatccgaatccgccgtccgataactgacacacattataagggattgttgatagatgagtgacacaggtttcacgttaaagattggtgaccgtagctgggtgttggcggatgcggaggagacggcgcaggctgttcctgcccgcgtgtttcgccgtgccgctaggattgcccagtcgggggagtctgcggatttcgcccaggttgaggtgatgttttctatgttggaggctgccgccccagaggatgctgtggaggccctggaggggcttcctatggtgcgtgtggccgagattttccgccagtggatggaatataagcctgacggtaaaggggcttccctgggggaataatttggctccacggcctgattgatgattatcgtggggccatcgaatacgattttcgcactaaatttggtgtttctgtttatagtgttggtggcccgcagatgtgttggggtgaggctgtccggctggctggcgtgttgtgtactgacacgtctagccagttggcggcccacgtgaatggttggcagcgcccgtttgagtggtgcgagtgggcggtgttggacatgttggatcattacaggtctgctaatagtgaggggcagccggagcctgtggcgaggcctactgatgagcgcagggcgaggtttacgtctgggcaggtggacgatattttggcgcgtgtccgcgctagtggcggggtgtctcgcgagattaatattatggggtgaatagtgtatgtctggtgagattgcttccgcatatgtgtcgttgtatacgaagatgcctggtttgaaatcggatgttggtaagcagctttccggggttatgcctgctgagggtcagcgttctggtggtttgtttgcttctgggatgaagttggcgcttggtggcgcggcgatgatgggtgccatcaatgttgctaagaagggtctcaggtctatctatgatgtgactattggtggcggtattgctagggctatggctatcgatgaggctcaggctaaactgactggtttgggtcacacgtcttcggatacgtcttcgattatgaattcggctattgaggctgtgactggtacgtcgtacgctttgggtgatgcggcgtctacggcggctgctttgtctgcttctggtgtgaagtctggcgggcagatgacggatgtgttgaagactgtcgcggatgtgtcttatatttctggtaagtcgtttcaggatacgggcgctattttcacgtcggttatggctcgcggtaagttgcagggcgatgacatgttgcagcttactatggctggtgtgcctgtgttgtctctgttggctaggcagacgggtaaaacgtcggctgaggtgtcgcagatggtgtcgaaggggcagattgattttgccacgtttgcggctgcgatgaagcttggtatgggtggtgctgcgcaggcgtctggtaagacgtttgagggcgctatgaagaatgttaagggtgccctgggttatcttggtgctacggctatggccccgtttcttaacggtttgcggcagatttttgttgcgttgaatccggttatcaagtctgtcactgattctgtgaagcctttgtttgcgtcggtggatcaggggattcagcgtgtgatgccgtctattttggcgtggattaatcgtatgcctggcatgatcacgagaatgaatgcacagatgcgcgccaaggtagagcagttgaagagcatttttgcgagaatgcatatacctgtcccaaaggtgaatttgggtgccatgtttgctggcggcaccgcggtgtttggtattgttgctgcgggtgtggggaagcttgttgcggggtttgccccgttggcggtgtcgttgaagaatctgttgccgtcgtttggtgctttgaagggtgccgctggcggtctgggcggcgtgtttcgcgccctgggtggccctgtcggtcttgtgatcggcttgtttgcggcaatgtttgccactaacgcccagttccgtgccgctgttatgcagcttgtgggtgttgtcggtcaagcccttggccagattatggcggctgtgcagccgctgtttggtttggttgcgggtgttgtggcacagttggctcccgtttttggccagattattggcatggttgccggtttggctgcccagcttgtgcctttgattagtatgcttgttgcccggctggttcctgtgatcacgcagattattggtgcggtgacgcaggttgctgccatgctgctgcctgcactgatgccggtgttgcaggctgtgatggctgtgatacggcaggttgttggtgtgatcatgcagctggtgcctgtgttgatgcctgtgattcagcaggttttgggtgctgtcatgtctgttctaccgccgattattggtttgattcggtcgctgataccggtgatcatgtctgttatgcgtgtagtaatgcaggttgttggtgccgtgttgcaggtggtggcccgtattatgccggttgtgatgccgattatgacggctgtgatcgggtttattgcacgtattcttggtgctgtcgtgtctgccgctgcacggattattggttctgtaactcgtgttatcgcctgggttgtgggccatttggtgtctggtgtggcgcgtatgggttcggctatcctgaatggctggaatcgtattagagcgtttacgtctgcgtttattaacggtttcaagtcgatcatttctggcggcgttaacgcggttgtgggggtttttgcgcggctgggttcttcggttgcctcccatgtgaggtctggttttaacgcggcccgtggtgctgtttcttccgccatgaatgggatccggggtgtggtgtcttcggtggcgtctgctgttggcgggttcttcggctcgatggcttctcgggttcgtggtgccgcctcgtccgggtttaacggggcacggagtgtggcttcttctgctatgcatgctatgggctcggctgtgtctagcggtgtgcatagtgtgctgggttttttccggaatctgcccggcaatattcggcatgctctcggtaatatggggtccctgttggtgtctgcgggccgtgacgtggtgtctggtttgggtaatgggatcaagaatgctttgagtggcttgttggatacggtgcgtaacatgggttcccaggtggctaacgcggcgaagtcggtgttgggtattcattccccgtctagggtgtttcgtgacgaggttggccgccaggttgttgctggtttggctgagggtataacaggtaacgcgggtttggcgttggatgctatgtctggtgtggctggaagtctgcctgacgctgttgatgcccggttcggtgtgcgatcgtctgtgggctcgtttaccccgtatggcaggtatcagcgtatgagcgataagagtgttgtggtgaatgtgaatgggccgacgtatggggatcctaacgagtttgcgaagcggattgagcggcagcagcgtgacgctttgaacgcgttggcttacatgtgatagggggtgtggttcatgtttcttcctgacccgtctgatcgtgccggtttgactgttacttggtctatgttgccgttgattggtaatgatccggagcgtgtgcttcatttgacggattatacaggtgcgtctcctgtcatgttgttgaatgattcgttgcgtggcctgggtgttcctgaggtggagcatttttctcaaactcatgttggggtgcacggctcggagtggcgcgggtttaatgtgaagcctcgcgaggtgacactaccggtgttggtgtcgggtgttgacccggatccggtgggcggttttcgtgacggttttttgaaagcctataacgagttgtggtctgcttttcccccgggcgaggtgggggagttgtcggttaaaaccccgtctggtcgtgagcgtgtgttgaagtgccggtttgattcggtggatgacacgtttacggttgatccggtgaacaggggttatgcgcgctatctgttgcatttgacggcctatgacccgttttggtatggggatgagcagaagtttcgttttagtaacgcgaagttgcaggattggttgggtggcggccctgtcggcgggaagggtaccgcttttccggtggtgttgacgcctggtgttggttcgggttgggataatctgtctaataagggtgatgtgcctgcgtggcctgtgattcgtgttgaggggcctttggattcgtggtctgtgcagattgatggtttgcgtgtgtcttcggactatcctgtcgatgagtatgattggattactattgatacggatcctcggaagcagtctgcgttgttgaacgggtttgaggatgtgatggatcgtctgtctgagtgggagtttgcgcctatcccgcctggcggttcgaagagtgtgaatattgagatggttggtttgggtgccattgttgtgtcggtgcagtacaggtttttgagggcttggtgaatagttgatggctggtcttgtcccgcagataacattgtttacgccagactatcgccgtgtggcgcctatcaatttttttgagtcgttgaagttgtcgttgaagtggaatggtttgtcgacgctggagttagtggtttcgggggatcattccaggcttgacgggttgacgaagccgggtgcacgcctggttgttgattatggtggtggccagattttttctgggcctgtgcgtaaggtgcatggtgttggtccttggcggtcttcccgtgtgactatcacgtgtgaggatgatatccgcctgttgtggcgtatgctgatgtggcctgtgaattatcgccccggtttagtgggttcggagtggcgtgctgacagggattatgcccactattctggtgcggcagagtcgattgctaagcaggtgttgggggataatgcttggcggtttccgcccggtttgtttatgatggatgatgagcgtcgtggccgttttattaaggattttcaggtgcggtttcacgtgtttgctgacaagttgttgccggtgttgtcgtgggctcggatgactgtttcggtgaaccagtttgagaatgcgaagtttgatcagcgtggtttagtgtttgattgtgtgccggcagttactcgtagccatgtgttgactgccgaatcggggtcgattgtgtcgtgggagtatgtgcgtgacgcccctaaggctacttcggtggttgtgggtggccgcggcgagggccgggatcggctgttttgtgaggatgttgattcgatggctgagggggactggtgggatcgggttgaggtgtttaaggatgcccgtaacactgattctgagaaggtgtctctcttcgatgaggctgagcgggtgttgtccgagtcgggggcctcgtcggggtttaagatcgagttggctgagtcggatgtgttgcgtttcgggccgggcaatctgatgccgggtgatcttatctatgtggatgtgggttctggtcctattgcggagattgttcggcagattgatgtggagtgcgattcgcctggtgacgggtggacgaaggtgacaccgattgcgggggattatgaggataatccgtcggcgttgctagcacggcgtgttgccggtttggctgccggtgtgcgggatttgcaaaaattctagttgattggggtttgttgtgggtattgtgtgcaagggttttgatggtgtgttgaccgagtatgattgggctcaaatgtctggtctgatgggtaatatgccgtcggtgaagggcccggatgattttcgtgtgggtacgacggttcagggtgccacggtgttgtgtgaggttctgccggggcaggcttgggctcacggtgtgatgtgcacgtcgaatagtgttgagacggtgacggggcagctgccggggccgggggagacccgctacgactatgtggtcctgtcgcgggattgggagcagaacacagcgaagttggagattgttcccggtggccgtgcggagcgtgcccgtgatgtgttgcgcgccgagcctggcgtgtttcatcagcaactgttggctactttggtggtgtcgtctaacgggttgcagcagcagttggataggcgtgctatagcggcccgtgtggcgtttggcgagtctgcggcgtgtgaccctacccctgtggagggtgaccgtgtgatggttccttcgggggctgtgtgggctaaccatgcgggcgagtgggtgcagttgtctccgcgtattgagacgggttcgaagtcgatcatgtttggtgggtctaacgtgtatgcttacacgatctcgtttggacgggagtttacgtctccgcctgttgtggtggcgtctatggggacggctgctggtggcaccacccagattgatgtgaaagcctacaatattactaccaaagattttggtttggcgtttatcacgaatgatggttcgaagccgaatggtgtgcccgcgattgcgaattggattgctgtcggcgtgtgactgtacaggtgttgtggcggatggtgtgatgttgggggggctgtggtgtcgtggtttactcctgcactggtggcctctatctgtaccgcgttggccactattttaggttctgttcaggcggtcacgtctaaatcgaggaagcgtttacggaggctgtctgcgcaggttgattcgatggaagagtatacgtggggtgtgcggcgtgaggttcgccggtttaacgctggtcttcctgatggggttgatccgcttgttttgcctgatccgcccggttttttgcaggattcattgggggggtgagtgatgagggagttggaggaagagaagcggcagcgccgcaattttgagaaggcttccctgctgttgttgttcctgtcacttgtactactggcggtggttgctgggggtgctttgcgtttcggatcggtgtcttctgagcgggattcggagcaggctagggccgagtctaatggtatagcggctaaaggtttagccagtcgtgtaaagcaggtgtgtacccagggtggtgtggagtctgttaagcttcaccgttctggtttgtgtgtggatgctgcccgcacggagcgtagcgtagcgggtgtgcagggtcctgccggtgagcgcggcccgcaagggcccgccggtgtggatgggcgtaatggtgttaacggttcggatgggcttgttggccctgttggtccgccgggttccccgggtttgaatggtgtgaacggtcctgacgggttgcctggggctaacgggtcggatggccgtgatggtgtccgtggtcttgcgggtgctgatggtaaagatggcgtgaaaggggatctgggcgatactggtcccgctggtgagcctggtgcgcccggttctgcgggttctgccggcacgcaaggtgcacagggtgaacggggtgagcgcggccctgccggtgtgaacggatctgatggtaaagatggtaaggatgggcgtgatggccgctcggtggtgtccgtgtactgttctggggggcgcctggttgtgaaatatagtgacggtgtggcttccacgatatcgggttcggtggcctgcgagagtgtgaaaccgtcgccggtggttaccgtgtcatcccgcaaatagcagaagaggaaagggtgttactggtgttgatgatgtttgggggtggtgtgcggtgagatacattccagcggcgcaccattctgccggttctaatcatccggtgaatagggttgtgattcatgcgacatgcccggatgtggggttcccgtccgcctcccgtaaagggcgggcggtgtctacagcaaactattttgcttccccatcgtctggcggttcggcgcattatgtgtgcgatattggggagactgtgcagtgcctgtccgagagcactattggctggcatgccccgccgaatccgcatagtttaggtattgagatttgcgcggatgggggttcgcacgcctcgttccgggtgccggggcatgcttacactcgggagcagtggcttgatcctagggtgtggcccgcggtggagcgggctgctgtgttgtgtcggcagttgtgtgacaaatataatgttccgaagaggaagcttagtgcagccgatttgaaggctggcaggcggggtgtttgcgggcatgtggatgttacggatgcgtggcatcagtcggatcatgacgatcccggcccgtggtttccgtgggacaggtttatggccgtagtcaacggcggtagtagtagtgatagtggggagttaactgtggctgatgtgaaagcgctgcatgatcagattaaacaattgtctgcgcagctcaccggttcggtgaataagctgcaccacgatgttggtgtggtacaggtgcagaatggtgatttgggtaaacgtgtcgatgctctgtcgtgggtgaagaatccggtgacggggaagctgtggcgcactaaggatgccctgtggagcatctggtattacgtgctggagtgtcgcagccggatcggcaagcttgaagccgatattgcccagttgaagaagtgatggtgatcgattgtgggtaaacagttttggttaggtttactggagcgggcggctaagacttttgtgcaaacgtttgttgctgtgcttggggtgactgcgggtgtgacttatactgcggagtcgtttcgcggtttgccgtgggagtctgccctgattacggccggggttgctgcggtgctgtcgattgctacctcgtttggtaacccgtcgtttgttgccggtaaaccgaaaacgacgcctgttgtggatgctgggcttgttccaccggatgatcctggaatagtggagtctcacatggttgacgaaacggatcctggcatgatcgagcctgtagacgatgctgatcttggtggctatgtgccgaagcgtgcagccgagtctgaggttggcacggtagagccgatcgaatgataagtgaatgtgtgtgtgccccagcggtgctgccacgattgtgtggtggttgctgctggggcactatttttgtgtctacaggggttttacaggttgtcgtctagggtgtcttcgagtgtctgttgtaggagtgcacactcggcgagggtgtcttcagcctggtcgacaatgttttgttttgctatgcctggatagttgttgcggtgattgtagatggcttccagaatgttgtctgccatgatttgtagtgttagggcctggttggtgatgcattccagctcgtctagggcggcctggctagcctccggctgccggttgtccggatgttctgcaaggttgcagtcccacaggatttcttggcatgcatccctggtgtctgcgtccacatcgatgtcgtctaggctgacaccgttggcgttgaggctgatgttgtcgaggttgatgggaaccagatattcgctgctgatgctgcaggtgatgtttgcgagttctgtcatgtttcgtggctgctgctgtatgatgcggcgggccgcggttttgagggctgtgactgttcggtgtctgttactgggcatcgtttctattcttcttccccggtgtagctggtggtgttggtgtactgggtgagtgtgatcaggcactggtcggcccactgtttcaccgtctgccgtgtcacacccaatcgttgggctgccaccgaataggtttgatcatacccgtagacttccctgaatgcggcaagccgtgctagccgtttccgctgttttgatggttcacatgtgagggtgtagtcgtcgatggccagttgtagatcgattatggttacaatgttgttgccgtgatgctggggggcggttggtggcggcggcattcccggttcgacggatggtttccatgggcctccgttccagatccattgggcggcttggataatgtcggctgtggtgtaggtttggttcacgggtcaccccctgaacaggtcgtcaaggctgttggtgttggtggtgtcgaatcgtcccacacagtggcagtagtcgtacatgagtttgataatgtgttggtggtcgcctaggtaggtgttgccgctgatactgtaggtggctgtgccgtctttgcttatggtgtatttggcggtgatggtttcgggtgtttctgtgttggtgatgatggctgtggtggtggagcctactgtttgtagcctggtggtttgggttccgtcgtcgaggatggtagtaaccattatggggttctccttttagttgctggtttggttgtcggctaggtgaataatatcggataaaggtttcggctggtctaggtgttgtatagttttgttggctagccgtttggctaccctgtaacacattttggtatagtgtttgttgtctaggttgtggtattgttcccgcaccgcaatatatagtagggagtcttggtacaggtcgtctgcactgattgcggggtagtgtgcggctgttttggtgcatgcccggttgagtgtgtgtagatgctggtttgtggcccatccccacgatgctgtggtggccaggtctgcttttgttggtcgtctactcatggcactatttcatctcgctatctgatagttgtttggtgttttgttgttgatagtgtagcacacgagtccggggtggccggtggtgcctgtgcggtgccggaaccatgtggattcgccttccatggatgggcattggatgaaggtgcgttgtccttgctcagagatttctaggtggtgccggtgcccggccatgaggatgtgggatgtggtgccgttgtggaattcttggccgcgccaccattcgtagtgttggttgttgcgccattggtgtccgtgggcgtgtaggatttgtgtgcctgccacgtcgacggtggtggtcatttcgtcccgctcagggaagtggaagtggatgttgggatactggttggtgagctggtaggcttctgcgatggcccggcagcagtccacatcgaatgaatcgtcgtaggtggtgactcctttgccgaatcgtactgcctcaccatggttgccggggatggatgtgatggtgacgttggcgcagtggtcgaacatgtggacgagttgcatcatggccatgcgggtgagcctgatttgttccgtcaagggtgtttgtgttcgccaggcgttgttgcctccttgtgacacgtatccttcgatcatgtcgccgaggaaggcgatgtggacccgttgcggttttcctgcttgctgccagtagtgtttagcggcggtgagggaccggaggtagtcgtcggcgaagcggctggtttctccgccggggatgcctttgccgatttggaagtctcctgccccgatcacgaacgcaacattactatctgttgtgctactggtggcgggttttgggggctgccagtcggctagcttagctacgagttcatccacgggataggggtctgttttgggttggtggtcaataattttttgtatggatcggcctgtttctccgttggggagtgtccattcggagatgcgtgtgcgccgtacggtgccgttggctagattgtcgtcgatggtatctgcttcgttgttgtggttggctagctgtgtgaggagccggtcaatattgtctatcactggttttcctcctcctcgttctgggtggtgttggtttgtttgcggcgatagtctttaatgacggtggcggagatggggtatccggcttgggtgagctgttttgctagccatgaggcggggatggttttgtctgcgagcacgtcggcagctttgttgccgtagcgttgaataagggtttcagttttggttgccatgatatcccatcggttgtgtggcgggctgccatcctgtgcggcagtcgccgtcgtgtcctggtttgcgtgtgcaccatgtggtagcaccgtcctggtggtggattgttttgccgcacatgacgtcccggagatgctcaggcagtgcgccgtcatcctggttgctggtttgtgtgtcgaagagtgttttctggttggtgaaatgctcggatacggtgccgttgtgtacgggtagtatccatgttttccattgctgctgtagccgagtgttccagtggaattgtttggctgcgttttcggcctgttttaaggttttgtagtagccgacgagtatgcgctgatgctgctgatcgggaggattttggcctcgccaatattgtgccgccacggcgtagcggttactgtctgtgaaggtgttccaacagtattcgataatgttgttgagtgtgtcgtctataacatctgtgtcgctgttgggtaattcttgggcgatgatgtcgcggatggcttgccggtttcgggtggtgggtttgaacgagatgctcacgatagtaccggctggtcgtcttgcatgaactggttgaaggagccgtctccagcatgtcgtgcctgtgtgatgtcctggtcggtccagtcggggtgctgctgtttcagatagtgccagcggcaggcgtcataggtttcgttttggagccgagtgagatggttttctgtgatgatgtgtttccacattgtccacgagacgtcgagtctgcggagcatgtccatggccggcacattaaacgagttaaggaagagtatttcgtgggtgtagtattccttctcgtactggtcccatccgcttcggtgtctgttgggctggtttttggggtaggcttcccggcatactttgtgcaaacgtttggccatgtctttgggtagcctcatgtcggggttggcgcggatcatggatcgcatcccatcataggtggtgccccaggtgtgcatgatatgtagtgggtcttcaccgtctgcccatttttctgcacagatggcgaggcggatgcgcctccgggctgcttggctggtgttgcgccggttggggatggggcacgtgtcgagaggatccatgatgtttcatatgcctttctttgtttgggttgcttgtgtggttttactgtagcacagtgttgagtgcttgtgtcaaccctgttttgccggcttgcaggtaggtgtctgtgacatccccaactgtgaggggcacatgggtggcttgggggagtgccgcctggagggtttgggccatctggtctcccgccttgtctgggtcggaccatatgtagatgtggtcgtagccttcaaaaaatttggtccaaaaagtttgccacgaggtggctccggggattgcgacggccgaccatccgcattgttcaaggatcatggagtcgaattcgccttcgcaaatgtgcatgtctgtttgcgggttggccatggcggccatgttgtagatggagcctgtgtctccggccggtgtcaaatatttggggtggttgtgggttttgcagtcgtgcgggagtgagcagcggaaacgcatttttcgtatctcggctggccgcccccaaacggggtacatgtatgggatggtgatgcactggttgtagtcttcgtggccgggtatggggtcattgtcgatgtatccaaggtggtggtagcgggctgtttcttcgctgattcctcttgcggagagcaggtcgagaatgttttcgaggtgggtttcgtagagggccgaggctttctggattcggcggcgttccgcaatgttgtatgggcgtatgctgtcgtacattcgggtttctttcttctagatattgttgtagcttgtggagtccgcctccgacaccgcatgtgtggcagtaccagactcctttgtcgaggttgatgctcatggagggctggtggtcgtcgtggagtgggcagaggatgtgctgctcgttcctggacgggttgtaccgtatgcgatattggtcgaggaggcggcatgtgtcagaggtgtgggaggagctcgttgagggttgataccacataggcttcactccatggcttgttgcgctgtttcatcactacgaggccgatagtggactggctggttttgtttcggtgtgtttcatagttccttgcctctcggctggcttgtttcacgaattcggcgaggtgtggctgtccggctttcgcctcgataatgtaggttttgttgccggtttggaggatgaggtcgccttcgtcttcgcgcccgttgaggtgaagccgctcgatattgtgtccggtgtcgcgtagctggtggaggagtctcgtttcccattcggcaccggcccgccggttgcgtgcctgctgtgaagccatcatagtcctttgtgtgttgtggtcatgttccatggctgtttttcggcgaggggcccgaagaatgtgtattcggggtaggctcgcagccgctcgtatcgggtgccgtcggggctggatttgcctgtgcgctgtttcaacacggcgatgcgggcctcggccggtatcgatagtccgttgccgttatcctcaccaccgtaaagtgatactcccaatatgagttgcggtttttcggagaggccgtttttgatttccctccgggctggcgggtgttcaatgtcggttccggttttgtcggttgcgtggtgggtgacaataatggtggatcctgtgtctcgaccgagggctgtgatccattgcatggcttcctgctgggcctggtagtcggattcgcagtcttgaatgtccatcaggttgtcgataacaatgatggggggaaagtggttccacatttccatgtaggcttgcaactccatggtgatgtctgtccatgtgatgggtgactggaatgagaatgtgatgtgttggccgtggtggatgctgtctcggtagtattctggcccgtagttgtcgatgttgtgttgtatctgggcggtggtgtgttgggtgttgagtgagatgattcgtgtggaggcctcccagggtgtcatgtcccctgatatgtagagggcgggctggttgagcattgcggtgatgaacattgctagcccggatttttggctgccggagcgccccgcaatcatgacgagatcccctttgtggatgtgcatgtccaggttgcggtagaggggttctagttgtggtatgcggggcagctcagctgcggtttgggaggctctctcgaaggatcgttgtagagagagcatcggagcctttatctatctgttacggttgaaggatatatgggtggtcagatggagtcgatgtctacatcgtcgcttccgccagtgttgggtttgctgtctcgcttgtcaacgtaggctgctacgaggtcgtagatggcatcatctaatggtttgaggatgacggcgttgaaaccgtttttggtgcgcactgtggcgagtttgaaggcctgctcctcgccaaggtaggtttcgagttcgcggatcatggagtgtgggcgatcattgttgccgcgcgctttctcaataatagcgttggggatggtttctggggtgccgttgttgagatcctggagtgtgtggaagatagtaacgtcggcgtaaatacggtctgcgacctgtccgccgtatccttcggtgttgtgctcgacgtcgtggactttgaaggcgatggcggtggcgtcctggtttttggaggggttgaagaaggtgctgtcgttgttgttgcggtagtttgcgagtcccattgttgtttcctttactgttttgttggtttgtgtcggtttttatcgggtgaggctgtttcgtttgctgcggaacgcctctgacacgtcggggttactggtgatggtctttttgtactgtttgagtagatcggctagctgtgccttgctggtggctttgttgattttgtcgatgacgatgtcgttttcttgggatgtgatgttgtctacatagtttttggctgcctggttgtatcggtcttggagaatgattgatgcggaggctgtgagggttgccaaatcccagtctttggacacgtcatcgtttttgaggcctccgaggaggtcgatgatggcctgtttggcctgattggctgtgtctcctcggattacagcccacggtgcggcatagtctccaccgtatttgagtgtgatggtgatgcgatcatcaccggtgttggtgtcggtcactggttctccttgccttcctcgagtggtgtgatggtggtttggatcgggtacctgtaggcgtctttcccgtctatagcccagcaggcgtcccgtacggggcatcctttacacagggctgtgacgtgtggaacgaagatgccttgactgattcctttcattgcttgactgtacatggatgatacatgccggtgggtgttgttgtcaagatcgtagagttcggtggctgtgccctgctcgactgatagctgatcattcttagtggtggcgggtgtccaaaacatgcctttcgtcacatggatgccccgctgttcgagcatgtaccggtatgtgtgcaactgcatagcatcgactggcaggcgacccgttttgaggtcgaggataaacgtttcgccggtgtctgtgtcggtgaagacacggtcgatgtagccgacaatctttgtgccatcctggagggcggtttctaccgggtattcgattcctggtttaccgtctaggattgcggtgatgtattctgggtggtttcgcctccatgttttccagcggtcgacgaagatggggccatagtgcatccaccaatcatagtttttcttgttgggtcctccgctttcgcacatgtttttgcacactctgccagagggtttaatctcagtgccctcggactgagcgaaggctacctgtgtgtcgaaaacattgttgaaggatagaaggttgtcgggtatttcgggatattctgcagggttgtgcaggtggaggtcgtattgttcggtgatgtggtggatcgcactgccggcgatggtggcataccaggtgtgataggtggccttgtagccgtgggagaggcgccatttttctccacattcggcccactgcgatagggagctgtaggagatgtggcctgggtggttgatggttttcgggtattgtgctagaggcattacttgtcgcttttattccatgggttgcgggtgtcttggccggcgtcatgctgctggtatgcgaggagtgtcaggcagtgccaggcggcatgtgccagatgcggcaggtgtgattcatcgtcgagattgtttccttgctgccaggctagcaggtgcctgtagagggcgtcaatactgtgacaccaggggtatcctccggtccagttgttgtctccgtatttggtggcaccgtatccggcaacctcacctaaagcatggagggatgcggggtcgatgagggagagccggcatagtttgagttcttttcgggcgcccgtgttggggtcggtgtacatgcgggtgggctcatccatggggtgtgtgctccttaagggtgggttactggtttttgtcgtgggcgagtgctacggcgagaataatgatggcgagggtttcagcgatcaggatgggtgttgtgatcatttgtggtctttgggctggtaggtgagtgttgatgcacccaggagggtggctagggcgcatgcggcaatgatggcgagggcggctttgtggctggtgcctgttgcgtacatccatgtgataataccgccttggatccaggccaggctggtgaagaacgtttcgtagctgtgcaactcgatacggttgggtgtgttcatgcttgctcctgaagaatggtgttgatggttttataaatgttgtacaggtcggtttcgatagataacagttggtggatttcgtggtcgagattgatgtctgggttgagggtgttgatgcgggatgcaatatcggtggctgtgcgtagtgtgccgccggtgtggtgaataatgtgtgccgtgtcggcgagtccggtggtgacagcgtagtgggagaggagaggcatagcggggatgctccttggctggttactgttgcgggttgatgttgaggtcggtgacgttggggtggtcttctgttcctgtgatgaggcagtggacggtgacgggtagtttggatgcgccgggctgtttcatggttgcgccgtagacgatgctgaacgtgtctttgccaataattttgtggagttgtaggtcgatgtcggggttgccgttccatttgataccgtgtgcggcggccttctgctcagccttgtcattgcaggtgtgggctgccgtaatcatggtgagtccggttgcggtttcttcaccccttgcttgggcttgcttgtgggttttgtcctgctcggcttgtagggatcgggtggcttcagcctgcttggcggctttctcggctttgcgctgctgggcggtttcaggtgtccatgcagtgtttgctgtggtgacctgtggggccggctgtgatgcgagtggcgggttgtcgtcgggggctggtaggaaggaggctgcggcaataatggcggctgtgattccagcgatggtgtagccgtttttcttgttcatgattttgtattcccctttccggggtgttgttcgttgctgacatgattgatacttccagactggactatgactgtcaaagtgtcgctcagtttgtgtgagcgatccttgtggggtgagggggttttatcgggcgaacagagttaacaggtggccgatgttgatgcggctcacattccagtagagttgtgtggcttcaccgctggtgagcggcttccacgtgtcatggctgtacacggtaccgtcggatgcgatgaatgtgttggggcgtagcttgtgaagttcagtctctacgctctgccggtaggcttcggcgaggccctcaaaatccaggtggtcgcaggcgaggttttcaaggcgtgtcaggtcgaaaggtgtggggcagtcgtagctggcgggggcgtagagctgggtgaaatggtttgcgatcttttgcatcatgattccttttctcgtgtgatgggttgatagttttatcgtgtagcttcggcgaggatgacgtctacatcgatcacgtcgatcatgtcgtggagttcctcagcttcgtcctcagataggtggcgccagtcgtagtcgccgtacacggcgccgtcgagggtgacagtccacaggggccggatgagccgtatggcttcttcgactttggcgtggtacatgcggcgcaccctatccagatccatgtcgtctgactggtttccggtgaggctgtggaggctgagtgggttgatttctgtctgcccgtagaggctggtgaaggatggtgtgatgagtgtgccatccatgaggggatgctcctttcggtggtggaggggttgttgtggtttctagagtgtgcgggctgcgactccatagtcaaggtggcactcattcggattgagcgtttcatgctggagtgttgggtgtgacagatgtcacttgagcctttattgcctctctcggcgtctcaaatcttctgggggtaggattatgcagggttgaccctgctagtcgattctagggcccttctagggcgtctcaagggtatgtctgggttgtagcgagtgttgcagatgatctagcaggtcgagataggtctgtctcgcaggggtgggggtgccctaattgggcatggcatctaatccccagagtgtgtgagataggccacatctccctagcttgatacgtatcctcgaagctactctgccgatctggcgtagagggtgtagcccagaaatgccgtttaaagcatcagcatggcgcccaggagcgccttacagggtgggggctaggtatttatacccccagcacattctgatcgattctagacgcataccggagccttgtgcgagatcagctctccggacgcagatcatcagcccctatcctgcttagctaagcctgcactatgtggacagcgtgggatgctaaggggggaaggacacggtaaaaagaagaggggggagcatcagccttcacgtcttaggtactgaagttcaccttagggtcttagcacttagcaccgagccccttgaggggctcggcatcagcccgagccggctcagctcatcaggcacagccctgaaaagggtacacgccatcaggggaagtcttgagagtacgaggagcctcagcgacgagtactcgaaagcctgagggaacaccctgagcgctgatgggcctagcgtgttcggaaaagacacaagagtgaagtgtgacagctgtccgggagtgaaacccgttctggctaggggttttagtcttaaacacccgtaaaggttacaagactctaagaaaatttaaggaaaagtttaggttttatttttggacctttactaccaaaaacacccgtttacaccccctcaaacccgccaatagagccaaacagtcatgtttggctcatcccaggtggcgtatgctaggctggacaggtagccagctggacgcaaggccgaaatccgctgacgcggctttcacccttacatccatcagtctacaaaacacttaaagaccttaagagctaagcgctcaggtgctgatagcttagcaccgagcccctcaagggctcggcatcagtcttaggtactttagataactttaaaacattcaaggcttagcccttaaagttataaataaactttaaagctttaaagtcttaaagtacatataaaaccttaagacttaaacagctaagttaactataaggccttaaagacttagcacttaaggatataaacttaacatcagtatttataacttataagccttaatactttaaataactataagatcttaaaggcttaaacacttaaagtaactagaagactttaaaatcttaagtacttaaagttaaccatcagtcttaaactttaatactataacctataagtcttaaagcttataggtataataatataactatataagtattaaggcttataagttataaaagttttagaagagctaaggggttaacttctttacttctctactctctttggtactttctctcttctcttcttttcttcatcaggggagaaggggaacctttaccatcaacgccgatgggcttttcgccgtgtgactcgtgtgcttggtcgcaagctcccatcgcacactccccacactcttacacccgtatccctttacagctttgtgtgttcggctgaaggcgtacggcgtgtcacgcttaaacccttaacacccggtaagacttaaagtgtatattatatgtagaagattttaaaaactttaagggtgtacacgttttggctgtgtcctacaccgctaggcgctaagcctggaagtgctaacacacactcacccccatttttcttccgtgttcttctctttttgacacagctggggggcgatgtgatctttctcacacccgtgggggtagtggagaaaacaaacaccccgccacgatcacaacaccccctcaaactaacaaaacagcccccagaatcgaacagcagggcaatggcaaggtattcatacccccaacggtttccaagtcctcagagaggcaatgagagcccatagaggcgtggtagacgatcgggaggcgatatggcacacaccaaccgcaccgcatcctccgcacaccggcgctggcggcaacaactcatcaccaaagcccgacaacaaggccaaaccgaatgccccttatgtggagtcaccctcacctgggacacccaccagctgccaaccagccccgaagccgaccacatcacacccgtcagccggggaggactcaacaccctagacaacgggcaaatcatctgcagaacatgcaacagaagcaaaggcaacagaacacaaccaaacatcaaactccaacaacaaaccacaaaaacactcgtcatctggtaaaaaacccgccaacccccaccggggacaccccctgcacaggcgtgcaagacc

SEQ ID NO: 38 - DNA, 29511 bp, Bacteriophage of P. acnes
agtgaaatacctcccctttgttgttttatcgttttgtcgactttttgtttggtggtgatggtggtgcagcctgagcttcccgagtctcgtgagtggtgtgaggagacgcgtcgttggtggcgtgtgtggggtgaggatgcgcgtgctgggtttgtgtctgatgaggagtggctgtttctcatggatgctgcggtgattcatgatgtggtgtggcgtgagggtcgcgcggaccttgtggcttcgcttcgtgctcatgtgaaggcgtttatgggcatgttggatcggtattcggttgatgtggcgtctggtggtagtggcgggggttctgcggtggcgatgattgacaggtatcggaagcgcaagggggcctgattaggtgtctggtgtggttggttctcaggttcctcgtcatcgtgtggcggcggcgtattcggtgtctgctggtggggatgctggtgagcttggtagggcgtatgggttgtcgcctgatccgtggcagcagcaggtgttggatgattggcttgctgttgggacgaatggccgtttggcgtctggtgtgtgtggggtgtttgtgcctcggcagaatggcaagaatgctattttggagattgtggagttgtttaaggcgactattcagggtcgccggattttgcatacggctcacgagttgaagtcggctcgtaaggcgtttatgcggcttcgatcgttttttgagaatgagcggcagtttcctgacttgtatcgtatggtgaagtcgattcgtgcaacgaatggtcaggaggctattgtgttgcatcatccggattgtgccacgtttgagcgtaagtgtggctgtccgggttggggttcggttgagtttgtggctcgtagccgggggtctgctcgcgggtttaccgttgatgatttggtgtgtgatgaggctcaggagttgtcggatgagcagttggaggctttgcttcctacagtgagcgctgccccgtctggggatcctcagcagatttttttgggtaccccgccggggccattggctgatgggtctgtggtgttacgtttgcgtgggcaggcgcttggtggcggtaaacgtatcgcgtggactgagttttcgattccggacgagacggatccggaggatttgtctcggtcgtggcggaagcttgctggggatactaatcctgcgcttggtaggcgtctgaattttggtaccgtgtctgatgagcatgagtctatgtctgctgccgggtttgctcgtgagaggcttggttggtgggatcgtggccagtctgctgtgtcggtgattcctgccgataagtgggcgctatcggcggttgatgaggtgcatctttctggtgggaaagtgtttggggtttcgttttctcgttctggtaatagggttgctttggcgggtgctggcagggcggatgctggggttcatgttgaggttattgatggcttgtcggggacgattgttgatggtgtaggccaactggctgattggctggcgttgcgttggggtgacacggaaaagattatggttgccggttctggtgcggtgcttttacagaaggctttgactgatcgtggtgtgccgggtcggggcgtgattgtggccgataccggtgtttatgttgaggcgtgccaagcttttctggagggtgtgcgttcgggtgttgtttctcatccccgtgctgattctcgccgtgacatgttggagattgctgtgaggtcggcggttcagaagcgtaagggatctgcttggggctggggctcgacgtttaaagacggcagtgaggttcctttggaggctgtgtcgctggcgtatcttggtgtgaagatggcgaaggctaagcggcgtgagcgtagtggtaggaagcgggtgtctgtggtatgaacgtggacgagttggctcttattgagggcatgtacgatcgtattaagaggttgtcttcgtggcattgccgtattgagggctactatgagggttcgaatcgtgtccgtgatttgggggttgctattcctcctgagttgcagcgtgtgcagacggtggtgtcgtggcctgggatagcggtggatgctttggaggagcgtctggattggcttggctggactaatggtgacggctacggtttggatggtgtgtattctgcgaatcggcttgctacggcgtcgtgtgatgtgcatttggatgcgctgatttttggtttgtcgtttgtggctgttattccccaagaggatgggtcggtgttggttcgtccgcagtcaccaaagaattgcaccggaaagttttcggctgacgggtcgcgtcttgatgctggcctggtggtgcagcagacgtgtgatcctgaggttgttgaggcggagcttttgcttcctgatgtgattgttcaggttgagcggcgggggtctcgtgagtgggtcgaggtgggccgtataccgaatgtgttgggtgcggttcctttggtgccgattgtgaatcggcgcaggacgtctcgtattgatgggcgctccgagattacgaggtctattcgtgcttacacggatgaagcggttcgcacgctgcttgggcagtctgtgaatcgtgatttctatgcttacccgcagcgctgggttacgggtgtttctgcggacgagttttctcagcctggctgggtgttgtctatggcttctgtgtgggctgtggataaggacgatgacggtgatactccgaatgttgggtcgtttcctgttaatagtcctaccccttattctgatcagatgcggctattagcccagttgactgctggggaggctgcggtgcctgagcgctatttcgggtttatcacgtctaacccgccgtcgggtgaggcgcttgcggcggaggagtctcgactggttaagcgtgctgagcggcgtcaaacatcgtttggtcagggctggctgtcggttggttttctggctgcgaaggcgttggattctcgcgtggatgaggctgcttttttcggtgatgtgggtttgaggtggcgtgacgcgtcaaccccgactcgggcggctacggcggatgctgtgacgaagcttgtgggtgccggtattttgcctgctgattctcggacggtgttggagatgttgggtttggatgatgtgcaggttgaggctgtgatgcggcatcgcgccgaatctgcggatccgttggctgcgttggctggggctatttctcgtcaaactggcgaggtttgatggatggcttcgggtgtgatgtcgaggctggcggcgactgagtatcagcgtgaggcggtccggtttgccgggaagtatgcgggctattatgccgagcttggtcgtttgtggcattccggaaaaatgagtgacacgcagtatgtgcgtttgtgtgtcgagttggagcgtgccggccatgatggttcggcgtcgttggcggcaaggtttgtgtcggattttcgccggttgaatggtgtggatcctggtttgattgtgtatgacgagtttgatgctgctgctgcgttggcccggtcgattgcgaccacgaagattttgaagggtgatccggatagggcgaatgatactattgatgcgatggcggcgggttttgatcgggctgtgttgaatgctggccgtgacacggttgagtggtcggcgggtgcgcagggccggtcgtggcgtcgtgtcacggatggtgatccgtgtgctttttgtgcgatgcttgcaaccaggtcggattatacgactcgggagcgtgcgctaaccgtggggcatactcggcgtcataggcggggtggtaagcgtccgctgggttcgaagtatcatgatcattgtgggtgtacggtggttgaggttgttgggcgttgggagcccagttccgcggacaccgcatatcagcgggtttatgagaaggctcgtgagtgggttgatgatcatgggttgcagcagtcgcctggcaatattttgaaggctatgcgtactgttggcgatatgagatgattgatatggtttccggttgtgcgccgccggttatcggtgcacgtggttgtctcccgcacggggggcggcaagattgtgttgttttccgcaaggagtgtagggttaggctatggccgatcagaatgttgaagaacaaaacgtcgacaaagtagaagaggttcccgaaaagggtgacgttgttgacgtcgtaaaggatgatcaaagcgggcagacaggcgatcagtcgaagcatgatggtggagataagccgtctgggactgattggaaggctgaggctcgtaagtgggagtctcgtgctaaaagtaatttcgccgagttggagaagcttcgcgcctcggatggtgatgcggggtctactattgatgagcttcgccgtaagaatgaggagctcgaagaccggattaatgggtttgttcttgagggtgtgaagcgcgaggtggctgccgagtgtggcctttcggccgatgcggtagcttttctgtctggcggtgatcgcgagtcgcttgccgagtctgctaaagcccttaaggggctgattgaccatagtggtagtggtggcgcgggtgtgcgccgtcttgcggggagtgcccccgtggatgatgttaaacgacgtgagggtgtcgcgtttgtggatgctcttgtcaataattctaggagatgatttatcatggctgacgattttctttctgcagggaagcttgagcttcctggttctatgattggtgcggtgcgtgaccgtgctatcgattctggtgttttggcgaagctttcgccggagcagccgactattttcggacctgtgaagggtgccgtgttttcgggtgttcctcgcgccaagattgttggtgagggcgaggttaagccttccgctagcgttgatgtttccgcgtttactgcgcagcctatcaaggttgtgactcagcagcgtgtctcggacgagtttatgtgggctgacgccgattaccgtctgggtgtgcttcaggatctgatttcgcctgctctgggtgcttctattggtcgcgctgtggatcttattgctttccatggtgttgatccggctacaggtaagccggctgctgctgttaaggtgtcgctggataagacgtcgaagacggttgatgccacggattctgccacgaccgatctggtcaaagcggtagggctgattgcgggtgctggtttgcaggttcctaacggtgtcgccctggatccggcgttctcgtttgcgctgtctaccgaggtgtacccgaaggggtctccgcttgccggtcagccgatgtatcctgccgccggtttcgctgggcttgataattggcgtggacttaatgttggtgcttcttcgactgtttcgggtgccccggagatgtcgcctgcctcgggtgttaaggctattgttggtgatttctctcgtgttcattgggggttccagcgtaacttcccgatcgagctgatcgagtatggcgatccggatcagactgggcgtgatcttaagggccataatgaggttatggttcgtgctgaggctgtgctgtatgtggctatcgagtctctggattcgtttgctgttgtgaaggagaaggctgcaccgaagcctaatcctccggccggtaactgatttattgtagcggtgatatgtatatgtgcagggggtggtgttgatgggtatcattttgaggcctgaggatattgagcctttcgccgatattcctaaagataagcttgaggcgatgatcgctgatgtggaggctgttgctgtcagtgtcgccccctgtatcgctaaaccggacttcaaatacaaggatgctgccaaggctattctgcgtcgtgctttgttgcgctggaatgatactggcgtgtcggggcaggtgcagtacgagtctgcgggaccgtttgcccagactacacggtctaatacgcctacgaatttgttgtggccttctgagattgctgcgttgaagaagctgtgtgagggtgacggtggggctggtaaagcgttcacgatcacacccacgatccgtggcggatatgcacattctgaggtgtgttctactgtgtggggtgagggctgttcgtgcgggtcgaatattaacggctacgctggccctttgtgggagatatgatatgattaattttccttacggtgaaacggttgtgatgcttcagccgactgttcgtgtcgatgatcttggcgacagggttgaggattggggccatcctgtagaaaccgtgtaccataatgtggccatctatgcttctgtgtcacaggaggatgaggctgccggccgtgacactgattgggagcattggtcgatgctgttcaagcagcctgtcaagggtgccgattatcggtgtcgttggcgtattcggggtgttgtgtgggaggctgacgggtctcctatggtgtggcatcacccaatgtctggctgggatgctggtacgcaggttaatgtgaagcgtaaaaagggctgatggttgtggcacgtgatgtgaatgtgaagcttaacttgccgggtattcgtgaggtgttgaagtcttctggggtgcagggcatgttggctgagcgtggcgagagggtcaagcatgcggcctctgctaatgtgggtggtaatgcttttgataaggcccagtatcgtgccgggttgtcgtctgaggtgcaggttcaccgtgttgaggctgtggctaggattggcaccacctataagggtggtaagcgtattgaggcgaagcatggcacgttggctaggtcgattggggctgcgtcgtgatcgtttacggtgatcctcgtgtgtgggctaaacgtgtgctcaaggatgatggctggctgtctgatataccgtgcacgggtactgtgccggatcaatttgagggtgacctgatttggcttgcgttggatggtggcccccagttgcatgttcgtgagcgtgtttttcttcgcgtgaatgtgttttcggatattccggatcgtgctatgtcgttggcgcgtcgtgttgaggctgtgctggctgatggtgttgatggtgatccggtggtgttttgtaggcgttctactggtcctgatttgttggttgatggtgcacgttttgatgtgtattcgctgtttgagctagtgtgccgtcctgtcgaatccgagtaaacgtatttgttttctatattttgtttttgtttgattatttttgggggttgtgatggctgctacacgtaaagcgtctaatgttcgctctgctgttaccggtgacgtctatattggtgccgctcacgccggtgacactattgatggtgttgggaagattcctgacggtcttaccgctttagggtacctgtcggatgacgggtttaagattaagcctgagcgtaaaacggatgatttgaaggcttggcagaatgcggatgttgttcgcaccgtggctacagagtcgtctatcgagatttctttccagctgatcgagtccaagaaggaggttatcgaactgttttggcagtcgaaggttactgccggagtcgattcgggttcgttcgatatttctcctggtgctacgaccggtgttcatgccctgttgatggatattgttgatggcgatcaggttatccgctactatttccctgaagctgagcttgtcgatcgtgacgagatcaagggtaagaatggcgaggtgtatgggtatggtgtcacactgaaggcgtatcctgcccagattaataagaagggtgatgcggtgtctggtcgggggtggatgacggctttaaaagctgatactcctccggttcctccgaagcctccgaagcctgagccggatcctaatccgccagccgagaactgatacatatttttgagggattgttgatagatgagtgacacaggtttcacgttgaagattggtgaccgtagttgggtgttggctgatgcagaggagacggcgcaggctgttcctgcccgtgtttttcgccgtgccgctaagattgcccagtcgggggagtctgctgatttcgcccaggttgaggtgatgttttctatgttggaggctgccgccccagcggatgctgtagaagcgcttgagggcttgcctatggtgcgtgttgccgagattttccgtgagtggatggaatacaagcctgacggtaagggtgcctctttgggggaatagtttggctccacggcctgattgatgattatcgtggggccatcgaatatgattggaggacccggttcggttgctctgtttatgatgttggtggcccggtgatgtgttggggtgaggctgtccggctggctggcgtgttgtgtactgatacgtcgagccagttggcagcccatctgaatggttggcagcgcccgtttgaatggtcggagtgggcggtgttggatatgttggatcattacaggtctgctaatagtgaggggcagccggagcctgtggcgaggccgacggatgagcgtcgggctaggtttacgtcgtctcaggtggacgatattttggcgcgtgttcgtgtcggtggcggggtgtctcgcgagattaatattatggggtgaatagtgtatgtctggtgagattgcttccgcctatgtgtcgttgtatacgaagatgcccggtttgaaggctgatgttggtaaacagttgtcgggtgtgatgcctgctgagggtcagcgttcgggtagtctttttgcttccggtatgaagttggctttgggtggcgcggcgatgatgggtgccatcaatgttgccaagaagggcctgaaatcgatttatgatgtgactattggtggcggtattgctagggcgatggctatcgatgaggctcaggctaaactgactggtttgggtcacacgtcttctgacacgtcttcgattatgaattcggctattgaagctgttactggtacgtcgtatgcgctgggtgatgcggcttctactgcggctgctttgtctgcttctggtgtgaagtctggcgggcagatgactgacgtgttgaagactgtcgccgatgtgtcttatatttctggcaagtcgtttcaggatacgggcgctattttcacgtcggttatggctcgcggcaagctgcagggcgatgacatgttgcagcttactatggctggtgttccggtgttgtctttgcttgcgaagcagacgggtaaaacgtcggctgaggtgtcgcagatggtgtcgaaggggcagattgattttgccacgtttgcggctgcgatgaagcttggcatgggtggtgctgctcaggcgtctggtcagacgtttgagggcgctatgaagaatgttaagggcgctttgggctatcttggtgctacggctatggccccgtttttgaatgggttgcggcagatttttgttgcgttgaatccggttatcaagtcggtcacggattctgtgaagcccctgtttgcgtcggtggatcaggggattcagcgggtgatgccgtctattttggcgtggattaatcgtatgccgggcatgattacgagaatgaatgcacagatgcgcgccaaggtggagcagttgaagggcatttttgcgagaatgcatttgcctgtccctaaggtgaatttgggtgccatgtttgctggcggcaccgcagtgtttggtattgtggctgccggtgtggggaagcttgttgcggggtttgccccgttggcggtgtcgttgaagaatttgttgccgtcgtttggtgctttgaagggtgccgctggcgggcttggcggcgtgttccgtgccctgggtggccctgtcgggattgtgatcggcttgtttgctgccatgtttgcgacgaatgtccagttccgtgcctctgtgatgcagcttgtgggtgttgtcggtcaggcgttggggcagattatggctgctgtgcagccgctgtttggtttggttgcgggtgttgtggcccagttggcgccagtgtttggccagattattggtttggtggctggtttggctgcccagctggtgcctttgattagtatgcttgtcgcccggctagttcctgtgatcacgcagattattggtgcggtgacacaggttgcggccatgctgctgccagcactgatgccggtgttgcaggctgttatggctgtgatacggcaggttgttggcgtgatcatgcagcttgtgccggttttgatgcctgtgattcaacagattttgggtgctgtgatgtctgttctgccgcctattattggtttgatacggtcgctgataccagtcatcatgtcgattatgcgtgtagtgatgcaggttgttggtgccgtgttacaggtggtggcccgtattattccggttgtggctccggttgttggggctgtgatagggtttgttgcacgtattcttggcgctattgtgtctgccgcagcccgcattattggcgctgtaacccgtgttatcggatgggttgtgagccatctggtgtctggtgtggcgcgtatgggtacggccatcctgaatggctggaatcatattagggctttcacgtctgcgtttattaacggtttcaagtcgatcatttcgggcggcgtgaatgctgttgtggggttttttgcccggcttggttcttcggtggctagccatgttcggtctgggtttaacgcggcccgtggtgctgtttcttccgcaatgaatgctatccgtagtgtggtgtcttcggtggcgtctgctgttggcgggttcttcgggtcgatggcgtctagggttcgtagtggtgctgcgaggggctttaatggggccaggagtgcggcttctagcgctatgcacgctatgggttctgcagtgtctagcggtgtgcatagtgtgttggggttttttcggaatctgcccggtaatattaggcgtgctctcggtaatatgggatccttgttggtgtcggctggccgtgacgtggtttctggtttaggtaatggtatcaagaatgctttgagtggcctgctggatacggtgcgtaacatgggttctcaggtggctaacgcggctaaatcggtgttgggtattcattccccgtctagggtgtttcgtgatcaggttggccgccaggttgttgccggtttggctgaggggatcaccgggaatgctggtttggcgttggatgcgatgtcgggtgtggctggccgtcttccggatgctgtggatgcccggtttggtgtgcgatcgtctgtgggctcgtttacaccgtatggcaggtatcagcgtgcgagcgagaagagtgttgtggtgaatgttaacggcccgacgtatggtgatcctaatgagtttgcgaagcggattgagcggcaacagcgtgacgcgttgaacgcgttggcttacgtgtgagtgggggtgttgtgcatgtttattcctaacccgtctgatcgtgccggtttgactgttacctggtctatgttgccgttgattggtaatgatccggagcgtgtgcttcatttgacggattatacgggtgcgtctcctgtcatgttgttgaatgattcgttgcgtggtttgggtgttcctgaggtggagcatttttctcaaactcatgttggggtgcacgggtctgagtggcgcgggtttaatgtgaagcctcgcgaggtgacgttgcctgttttggtttcgggtgttgacccggatcctgcgggcgggtttcgtgacggttttttgaaagcctatgacgagttgtggtctgcgtttcccccgggcgaggtgggggagttgtctgtgaagactcctgccggtgttgagcgtgtgctaaggtgtcggtttgattcggtggatgacacgtttacggttgatccggtgaatcgtggctatgcccgctatgtgcttcatttgatagcctatgacccgttttggtatggggatgagcaaaagtttcgtttcagtaacgcgaagttgcaggattggttgggtggcggccctgtaggcaaaaacgggactgcgtttccggtggtgttgacgcctggtgttggttcgggttgggataacctgtctaataagggtgatgtgcctgcgtggcctgtgattcgtgttgaggggcctttggattcgtggtctgtgcagattgatggtttgcgtgtgtcatcagactatccggttgaggagtttgattggatcacgattgatacggatcctcgcaaacagtctgcattgttgaacgggtttgaggatgtgatggatcgtttgaaggagtgggagtttgctcctatcccgccaggcggttctaagagtgtgaatattgagatggttggtttgggtgccattgttgtgtcggtgcagtacaggtttttgagggcttggtgaatagttgatggctggtcttgtcccgcagataacattgtttacgccagactatcgtcgtgtggcgcctatcaatttttttgagtcgctaaagttgtcgttgaagtggaatggtttgtcgacgctggagttggtggtgtcgggggatcattccaggcttgacgcgttgacgaagccgggtgcacgccttgttgtcgattatggtggtggccagattttttctgggcctgtgcgtaaagtgcatggtgtgggtccttggcggtcttcgagggtgactatcacgtgtgaggatgatattcggctgttgtggcgtatgttgatgtggcctgtgaattatcgtcccggtttggtgggttcggagtggcgtgccgaccgtggttatgcccactattcgggtgcggcggagtcggttgctaagcaggtgttgggggataatgcgtggcgttttccgccaggtttatttatgaccgatgatgagcgtcgtggccgctatattaaggattttcaggtgcggtttcacgtgtttgccgataaattgttgccggtgttgtcgtgggctcggatgactgtttcggtgaatcagtttgaggataaggtgaatgatcagcggggtttagtgtttgattgtgtgcccgcggtgacgcgtagccatgtgttgactgccgagtcgggttcgattgtgtcgtgggagtatgtgcgtgacgcccctaaggctacgtcggtggttgttggtggccgcggcgagggcaaggatcggctgttttgtgaggatgttgattcgatggctgagggggattggtttgatcgtgtcgaggtgtttaaggatgcccgtaacacggattctgagaaggtgtctctcttcgatgaggctgagcgggtgttgttcgagttaggggccacgtcggggtttaagatcgagttggccgagtcggatgtgttgcgttttgggcccggcaagctgatgcccggggatttgatttatgtggatgtgggttctggccctattgcggagattgttcggcagattgatgtggagtgtgattcgcctggtgacggctggacgaaggtgactcctgttgcgggggattatgaggataatccgtctgccctgttggctcgccgtgtggctggtttggctgcaggtgtgcgggatttgcaaaagttttaaaagtgatgggggtttgttgtgggtattgtgtgtaaagggtttgatggtgtgttgaccgagtatgattgggctcaaatgtctggtctgatgggtaatatgccgtcggttaaggggcctgacgattttcgtgtcggcactacggttcagggtgccacggtgttgtgtgaggttttgccggggcaggcttgggctcacggggtgatgtgcacgtcgaatagtgtggagacggtgacggggcagctgcctggtcctggtgagactcgctacgattatgtggtgttgtctcgggattggcaggagaatacggccaagttggagattgttcctgggggtcgtgcggagcgtgcccgtgacgtgttgcgtgccgagcctggcgtgtttcatcagcagttgttggctactttggtggtgtcgtctaacgggttgcagcagcagttggataggcgtgccgtggcggctagggtggcgtttggggagtctgcagcctgtgatccgacacccatggagggggatcgtgtgatggttccttcgggggccgtgtgggctaatcatgctaacgagtggatgttgttgtctcccaggattgagacgggttcgaagtcgatcatgtttggcgggtctgctgtgtatgcttacacgatcccgtttgatcgccagttcagtagtccgcctgttgtggtggcgtctatggctacggcggctgggggtacgcagcagattgatgtgaaagcctacaatataactagcaaggattttggtttggcgtttatcacgaatgatgggtctaagccgaatggtgtgcccgctgttgcgaattggatagctgtgggcgtgtgaccgtgttgaggctgtggtggcggttggtgtgatgttggggggctgtggtgtcgtggtttactcctgcactggtggcctctatttgtaccgcgttggctactgttttgggttcggttcaggctgtcacatctaagtctaggaagcgtttgaggcgcctgtctgctcaggtggatgcgatggaagagtatacgtggggtgtgcggcgtgaggttcgccggtttaacgctggtcttcccgataatgtggatcctttggtgttgcctgatccgcccgggtttttgcaggatcagttggggggtgaatagatgagggagttggaggaggagaagcggcagcgccgtacttttgagaaggcttctatggtgttgttgtttctgtcgcttgtgctgttggcggtggttgctgggggtgctttgcgtttcggctctgtggtttcgcagagggattcggagcaggcgcgtgcggagtcgaatggtactgcggctaaagggttggctgcccgtgtgaagcaggtgtgcgcccagggtaggcaggagtcggtgcgtcttcaccggtctggcctgtgtgtggatgctgcccgtacggagcggagtgttcagggtgttcctggcccggctggtgagcgtggcccgcaaggccctgccggtgtggatggccgtgatggcagtaatggttcggctggtctggttggcccggttggcccgcagggttctcctggtttgaatggtgtgaaggggcctgacgggttgcccggtgctgacggcaaggatggccatggtggtgttccgggccgtgcaggtgatgacggtgtgaacggtgctgatggtcgggatggttcggccggtgaacgcggtgatgtgggcccttcaggttccgccggtccacagggtgaacggggtgagcgcggcccgcaaggccctgccggtgtcaacggatccgatggtaaagacggtaaggatgggcgtgatggccgctcggtggtgtctgtgtactgctcggagggccgcctgtttgtgaaatatagtgacggtgcgtcttctacagtgtcagggtctagggcgtgcccgggtgtggccccgtcgccgattgtgaccgtgtcatcccacaaatagtaagaggaagggtgttactagtgttgatgatgttttggggtggtgtgcggtgagatacattccagcggcacaccattcggctggttctaattctccggtgaatagggttgtgattcatgcgacgtgcccggatgtggggtttccgtccgcctcgcgtaagggtcgggcggtgtcgacggcgaactatttcgcgtccccatcgtctggtggctctgcccattatgtgtgtgatattggggagacggtgcagtgcctgtccgagtctactattgggtggcatgccccgcctaatccgcattctttgggtatagagatttgtgcggatggcggttcgcacgcctcgttccaggttccggggcacgcgtatacgcgggagcagtggctgtcgcctgaggtgtggcctgcggtggagcgggctgctgtcctgtgtaggcggttgtgtgaccggcatggtgttccgaaacggaagctgtccgtatcggatttgaaggccggcaagaggggtgtttgcgggcatgtggatgttacggatgcgtggcatcagtcggatcatgatgatccggggccgtggtttccgtgggacaggtttatggccgtagtctgcggccacgatagtggtagtgatagtggggagttaactgtggctgatgtgaaagcgctgcatgatcagattaaacaattgtctgcgcagcttactggttcggtgaacaagctgcaccacgatgttggtgtggtacaggtgcagaatggtgacttgggtaaacgtgtcgatgccctgtcgtgggtgaagaatccggtgacggggaagctgtggcgtacgaaggatgctttgtggagtgtctggtactatgtgttggagtgtcgcagccgcattagcaggcttgagtctgatatcaatagtttaaagaagtgatgtgtggtgggtaaacagttttggttgggcctgttagagcgcgccctgaaaacttttattcaaacgtttgttgctgtgcttggggtgactgcgggtgtcacctataccgcggagtcgtttcgtgggcttccgtgggagtcagctttgatcacagccacggtggctgctgtgctgtctatagcgacttcgtttggtagcccgtcgtttgtggccggtaaacccaaggttgctccggttgttgatgccggtcttgttccacccgatgataccggcctggtagaaccgcatgcggttgacgaaacggatcctggcatgatcgagccgatggatgatgataatgtggactatgtgccgaggcgtgcatccgagtctgaggttggcactgtagagccgtcagaatcataagtgaatatagtgtgtgccccagcggtgctgccacgtgtgtggtggctgctgctggggcactatttttgtgtctactgtatggctatgattcgttgttgtcgatggtggcttcgagcatctggtgcaggtgttcacactcggatatggtgtcacgggcttgatctaaaatgtctcgccggatcacgtttttgtggttgttgctgaggctgataagcgaacacatgatatcgtcggcggcggattgtagtagtttggcctggtatgcgattccggcgagccagtctatggcttccgggcttgcctgtgtgttgtctggcatgccactggtgttgctgttgtttgtggggtatcctgcactgtcgcagtcccacaggatttcgctgcactcgtctagcgtgtcttgatcgatgttgaggttgtcgaggctgacttctttgatggtgagatttacatcatctaaagagatgtggacgtggtattcgtcttgaatgtcggccacaatgttttccagctggttcatgttggtgggctgttgttggatgattcggtgtaccgctgttttgagggcagcgtgggggatattggttgtgttgttcatggttttatttcatccctgtactatcgtcgtctatgtatgatgttgtgttggcgtatttggtgagtgtgatcagtgtttggtctgcccactgtttcaccgtctgcctagtcacacccaatcgctgggctgccaccgaataggtttgatcatacccgtatacttccctgaatgcagccagccgtgccagccgtttcctctgtttggatggttcacaggtgagggtgtagtcgtcgatggctagctgtaggtcgatcatggtaacaatgttgttgccgtggtgttgtggagcggttggcgggggtggcatacctggctctactgatggtttccatggtccgccgttccagatccattgggcggcttgaatgatgtcggctgtggtgtaggtttggttcatgtgtcacccccggaacaggttgtcgaggttgtctaggttggggctggtgtttgtggtgtcgaatcgtcctacgcagtggcagtagtcgtacatgagtttaataatgtgttgatggtcaccaaggtaggtgttgccgctgatgctgtaggtggctgtgccgtctttgctgatggtgtatttggcggtgatagtttcgggtgtttcggtgttggtgatgatggcggtggtggtggtgcctactgtttggagtacggtggtttgggttccgtcgtcgagggttgtagtaaccataatgggggttctccttttagttgctggtttgattgtcggctatagtggtgatttcttgcaccggtttggggagatccaaatgctgtatggttttgttggctagccgtttggctaccctgtagcacattttggtgtagtgtttgttgtctaggttgtggtattgttctcgcaccgcaatatatagtagggagtcttggtacaggtcgtctgcgctgattgcggggtagtgttcggctattttggcgcatgcccggttgagtgtgcgtagatgatggtctgtggcccatccccacgatgctgtggtggccaggtctgcttttgttggtcgtctactcatgacactatttcatctcgctatctggtagttgtttggtgttttgttgttgatagtgtagcacacgagtccggggttgccggtggtgcctgtgcggtgccggtaccagacggattctccttccatggatgggcattgaataaaggtgcgttgtccttgctcggagatttctaggtggtgccggtgtcctgccatgaggatgtgggatgtggtgccgttgtggaattcttggcctcgccaccattcgtagtgttggttgttgcgccattggtggccgtgggcgtgaaggattttggtgcctgccacatcgacggtagtggtcatttcgtcccggctagggaagtggaagtgaaggttgggatattggttgttgagctggtaggcttctgcgatggcccggcagcagtccacgtcgaaggagtcatcgtaggtggtgacgcctttaccgaatcgtacggcttccccatggttgcctgggatggatgtgacggtgacgttggggcagtggtcgaacatgtggatgagttgcatcatggccatgcgggtgagcctgatttgttccgtcaagggtgtttgtgtgcgccaggcgttgttgcctccttgtgacacgtatccttcgatcatgtcgccgaggaaggcgatgtggacccggccgggtttgcctgcctgttgccagtagtgtttggcggctgtgagggatcgaagatagtcgtctgcgaagtgtgctgtttcaccctgagggatgcctttgccgatttggaagtcgcctgcccctaccacaaacgcacaatcactgttgttgctggtggtgtcggctggtttggggggctgccagtcggctagcttgtcgacgagttcatccacgggatacgggtctgttgcgggttggtggtcgatgattttttgtatggatcggcctgtttctccgttggggagtgtccattcggagatgcgtgtgcggcgtacggttccattggctagatcgtcgcagatggtgtctgcttcgtcattgtgctgggctagctgtgtgaggagccggtctatattgtctatcactggttttcctcctctttctgggtgttggtttgttggcggcgatagtctttgataacggtggcggagatggggtatcctgcctgggtgagctgtttcgctagccacgaggctgggatggttttgtctgcgagcacgtcggctgcttttgccccgtagcgttgaataagggtttcagttttggttgccatgatatcctatcggttgtgtggcgggctgccatcctgtgcggcagtcgccgtcgtgtcctggtttgcgtgtgcaccaggatatggttccgtctgtgtggttgagtgttttgccgcacatgacgttttgtagatgctctggcagtgcgccgtcaccctggttgctggtttgtgtgtcgaagagtgttttctggttagtgaaatgctcggatacggtcccgttgtggacgggtagtatccatgttttccattgctgctgtagcctggtgttccagtggaattgtttggccgcgttttctgcctgttttaaggttttgtagtagccaacgagtatgcgctggtgttgctggtcgggagggtttgggcctcgccagtattgtgcggccacggcgtagcggttgctggctgtgaaggtgttccagcagtattcgataatgttgttgagtgtgtcgtctgtgaagtcgtctgggttgtgttctgttgcctgggtgataatgccgcggatggcttgccggtttttggtggcgggtttgaacgagatgctcacgatagtaccggcttgtcgtcttgcatgaactggttgaaggtgttgttcccggcgtgttgggcttgtgtgatgtcctggtcggtccagtcggggtgttgctgtttcagatagtaccagtggcacgcattgtaggtttcgtcttgtagccgtgtgagatggttttcggtgatgatttgtttccacattgtccatgacacgtcgagccggttgaggatttcgagggctgggatgttgaattggttgaggaagaggatttcgtaggtgtagtagtttttctcgtattggtcccatccgcttcggtgcctgttgggctggtttttggggtaggcttcccggcatactttgtgtaaacgtttggccatgtcgtcgggtagtttaatgtcggggttggcgcggatcatggatcgcatcccatcataggtggtgccccaggtgtgcatgatgtaggtggggtcttcaccatcggcccatttttctgcacagatggcgaggcggatgcgcctcctggctgcttggctggtgttgcgccggttggtgatggggcacgtgtcgaggggatccatgatattttagtgtacctttcttggtttgggttgcttgtgtggttttattgtagcactgtgttgagggcttgtgtcaaccctgttttgccggttttcaggtaggtgtctgtgacatccccgagggtgaggggcacatgggtggcttggggaagtgctgtctggagagtttgggccatcttatctcccgcggggtcggggtcggaccagatgtaaacatggtcgtagccttcgaagaatttggtccaaaagttttgccacgaggttgcgccgggtatggcgacggcgggccatccgcattgttcgagtatcatggagtcgaattcgccttcacaaatgtgcatttctgctgccgggttggccatggcggccatgttgtagatggagcctgtatccccggccggggttaagtatttggggtggttgtgggttttgcagtcgtgttgtagtgagcagcggaaacgcatttttcttatttcggctggccgcccccaaacggggtacatgtaggggatggtgatgcactggttgtagtcttcgtggccggggatggggtcattgtcgatgtatccaaggtggtggtagcgggctgtttcttcgctgatgcctcttgccgagagaaggtcgagtatgttttcgaggtgggtttcgtagagggccgaggctttctggattcggcggcgttccgcaatgttgtatgggtgtagtgagtcgtacattcgggttttcttcttccaatcgttgttgtagcttggcgaggccgcctccaacaccgcatgtgtggcagtaccagacgcccttgtcgaggttgatgctcatggagggctggtggtcatcgtggagtgggcagaggatgtgttgctcgtttttggacgggttatagcggatgcgataggtgtcgaggaggcggcgggtgtcagaggtgtgggaggagctcgttgagggttgataccacataggcttcgctccatggcttgtttcgctgtttcatgatgactagtccgatggtggattggttttttttgttgcggtgggtttcatagttgcgtgcctcgattgtggcttctttcacgaattgggcgagatgctgctggccagccttggcttcgatcacataggttttgttgccggttttgaggatgaggtcgccttcgtcctctttgccgttgaggtggaggcgttctatatcgtagccggtgttgcgtagctggtgtaggagtctggtttcccactcggcaccggcccggcggttgcgtgactgttgtgaaaccatcatagtcctttatgttcttgtgtcatgttccatggctgtttttctaccaatggcccgaagaatgtgtattcggggtaggccctgagtctttcgtatcgggtgccgtctgggctagatttgccggtgcgctgtttcaacacagcaatgcgtgcctcggctggtatcgatagcccgttgccgttatcctcgccaccatacaatgagactccgaggatgagttgtggtttttcggagaggccgtttttgatctctcgtctggctggcgggtgttcgaggtcggtgccggttttgtcggtggcgtggtgtgtgacgatgatggtggagccagtatcccgacccaatgctgtgatccattgcatggcttcttgttgggcttggtagtcactctcgcagtcttggatgtccatcaggttgtcgatgacaataaggggtgggaaggtgttccacatttccatgtaggcttgtagttccatggtgatgtctgtccaggtgatgggtgactggaatgagaatgtgatgtgttggccgtggtggatgctgtctcgatagtattctggcccgtagtcgtcgatgttttgttgtatctgggtggtggtgtgttgggtgttgagtgagatgattcgtgtggaggcctcccagggtgtcatgtcacctgaaatatatagtgctggctggttgagcatggcggtgatgaacatggctagcccggatttttggctgccggaccgccccgcaatcatcaccaaatcccctttgtggatgtgcatgtccaggctgcggtagaggggttctagttgtggtatgcggggcagctcggctgctgtttgggaggctctctcgaaggatcgttgtagagagagcatcgggaccttatctatctatcggtggttgtgggtggtcagatggagtcgatatcgatatcagcctctgctgatgctgaagtgtcatctagctggccattatcgcgcttgtctacgtattcggcaaccttatcatagatggcgtcatcaaggggtttgagcacaaccgcgttgaacccgtttttggtgcgcacggtggcgagtttgaaggcctgctcctcgccaaggtatgcctctagatcgcggatcatggagtgtgggcggtcgttattgccgcgcgctttctcaataatagcgttggggatggtttctggggtgccgttgttgagatcgtctagggtgtggaagatggtgacgtcggcgtagatgcggtctgcgacctgtccgccgtagccttcagtgttgtgttcgacgtcgtggactttgaaggcgatggcggtggcatcctggtttttggacgggttgaagaaggtgctgctgttgttgtttcggtagttggcgagtcccataactgtatcctttactgtttgtgttgttttgttggtttgtgtcggtttttatcgggtgaggctgtttcgtttattcctgaaagcctctgacacgtccgggttgctggtgattgtctttttgtactgtttgaggaggtcggctagctgtgccttgcttgttgctttgttgattttgtcaataacgatggtgttttcttgggatgcgatgttgtctacatagtttttggctgcctggtcgtatcggtcttggagaatgatggaggcgctcgcgatcagtgttgccaaatcccagtctttagagacgtcgtcgtttttgagtcctcccagtaaatcaatgatggattgtttgatgtcttctgtggtgtctcctctgatgactgcccacggggcggcatagtctccaccgtatttgagtgtgatagtgatacgatcatccgtactgttggtgtcggtcactggttctccttatctttctcgagtggtgtgatggtggttttgatcgggtacctgtaggcgtccttgccgtctaccgcccagcaggcgtctcgtacggggcatcctttacacagggctgtgacgtgggggacgaagatgccttggcttattcctttcattgcttgactgtacatgcatgatacatgccggtaggtgttgttgtcaagatcgtacagttcggttgatgtgccctgctcgaccgattgctcgtatcccttggtggtggcgggtgtccaaaacatgcctttcgtcacctggatgccgtgttgggcgagcatgtaccggtaggtgtgcaactgcatagcatcgactgggatgcgcccggttttcaggtcgaggataaacgtttcgccggtgttggtgtcggtgaagatgcggtcgatatagccgacaatctgtgtgccgtcggcgagggtggtttcgactgggtattcgatgcctggctggccgtcaatggttgcggtgatgtattctgggtggtttcgcctccatgttttccaccggtcgacgaagatggggccatagtgtatccaccaatcatagtttttcttgttgggcccgcctgactcgcacatgtttttgcacaccctgccggagggtttaatctgggtgccctcttctttgaccagggcgatttgggtgtcgaacacattgttgaaggatgagagtttgtcgggcagtgcagggtattcgacggggttatacaggtggaggtcatgctgttcggttatgtggtgtatagcactgccggcgatggttgcataccaggtgtggtgttgggcatggtagccgtgggatagtcgccatttttcaccgcattcggcccactgtgtgagtgaactgtaggagatgtggcctggatgctggatggttttcggatattgtgctagaggcatgttagttgtttttgttccatgggttgcgggtgtcttggccggcctggtgttgctggtatgcgaggagtgtcaggcagtgccaggctgcatgggccagatgcggcagatgtgattcatagtcgaggttgtttccttgctgccaggctagtagatgtctgtagagggcgtcgatactgtgacaccaggggtatcctccggtccagttgttgtcgccgtatttggtggcgccgtatccggctacttcgccgagcgagtggagggatgcggggtcgatgagggagagcctgcatagtttcagttcttttttggcgccggtgttggggtcggtgtacatgcgggtgggctcatccatgagatgtgtgcgcctttcttgagtgggttactggttgttgtcgtgggctagggctacggcgagaatgatgatggcgagggtttcagcgatgatgatgggtgttgtgatcatttggtgtcgcggggatggtaggtgagggttgatgcgcctaggagggtggcgagggcgcaggctgcgatgattgcgagggctgctttgtggctagtgcctgttgcgtacatccatgtgatgatgccgccttggatccatgcgaggctggtgaagaatgtttcgtaactgtgcagctcaatgttgttgttgcgtgtgttcatgcttgttcctgaatgatggtgttgatggttttgtaaatgttgtacaggtctgtttcgatggtttttagctggctgatttggtggtcgaggttgatgttcgggttgagggtgttgatgcgggatgcgatgtcggtggctgtgcgtagtgtgccgccggtgtggtgaatgatgtgtgccgtgtcggcgaggccggtggtgacggcgtagtgggagaggagaggcatgataggtgtgctttctttctggtcagcgtgaagggttgatggacatgtcctcaacctgcggcttgtcttcggtaccggacacttggcagaaaaccttcacttgtgccttggatgccccgggttgctttgcggtggcaccgtaggcgatggagaaggtgtctttgtgggcgccgatgactttgtgtaggaagaggtcgatgtcggggtttccgttccagttgacaccttgcgctgcagccatctgggtggctttctgattgcaggcgtgtgctgccgtaatcatagtgagcccggtggaggtttcttcaccgcgggcttgcgcctgccgatgagccttggcctgctcggcttgtagggagcggactgcttctgcctgcttggctgtcttctcagccttgcgctgctgtgcggttttgggggtccattcggtgttggctgtggtggcctgtggggctggctgtgatgcgagtggcgggttgtcgtcgggggctggtaggaaggaggctgcggcgatgatggcgagggtggctccggcgatggtgtagcctgttttcttgttcatgaccgtgttcccctctcgtggggtttgttcgttgctgacatgattaatcattccatgggtggcatcggctgtcaagctgcgctcatttgggttgagcgttccttgtgtggctaggtgttttatcgggcgaatagggttaacaggtggccaacattgatgcgtgtcacattccagtagagttgtgtcgcctctgcctgtgtgagtggtttccactggttgtggctgtatacggttccgtcggtggcgatgaacgtgtcggggcgcatcttgtggagttcggcttccacatgctgccggtaggcttcggcgaggccctcaaaatccatatggtcgcagtggaggttttcgaggcgtgtcaggtcgaagggtgtggggcagtcgtagctggcggggctgtagagctgggtgaagtggtcggcgatcttttgcacgattattcctttccggtgatggtgtgttggttgtttgatcgtgtggcttcggcgatgatggcgtccacgtcgattgtgtcgatgatgtagtagagttcctcggcctcgtcctcggtgagtggctgccagttgcgtggcccgtatatggcgccgtcgagggtgacggtccattgtgggcggatgagccggatggcttcttcgactttggcacggtatagacgacagatgatagacgtctgggtgttgcctatgttgtgccctgttaggtgtgcggggtggagtgggttgatttctgtcggcccgtagagggttgtgaaggatggtgtgatgagtgttccatccacggtgggtgctcctttctggattgtttgggttgttgtggtttttatggtgtgatggttgcaaccgtgagtcaaggctgcgctcattcagcttgagcgtttcatgaggggtgtggtgtatatcactgaagcctttattgctcctgtaagcgtcttaaatggtctgggggtaggattatgcaggactaaccctgctagtcgattctagggcccttctagggcgtctcaggggtatgtctgggtgatggtaggtgttgtagatcattcggacgctcgaggttgtcatacatgacgatggttggggtgttctatctgggcataggttccactccctgtagtgtgtgagatagaccacatttccctagcctagtgtccatcaccaacaccccgcagctgatctggcgtggagggtgtagcccagaaatgccgtttaaagcttctagggtacacctaggagcgccttgcagggtgggggctaggtatttatacccccagcacattctgatcgattctagacgcctataagagctcgatacgtgatcagatcaccagacgcagaccatcctcccccatcctgcttagctaagcctacactatgtggacagtgtaggatactgtaggggaagaaagacacggtacaagaaagaagggggaggatccgccttaaagtcttagcacttaaggttttagcgcttagcaccgagccccctcaagggctcggcatcagcaccaccaggctcagctcatcaggcacagcctgaaagaggtacacgccatcagggaaggcttgagagtacgaggagccctagcgacgagtactcgaaagcctgagggaacacccttagtactgatgggcctagcgtgttcggaaaagacacacgagtcaagtgtgacagtccatcaggggtgaaacccgttctggctaggggtttcagccctaaccacccttaaaggttacaagagtctaagaaaatttaagaaaactcttaggaagaaagttgtgttcatgtccacccaaaaacagccaaaatagccctcaaacccgctaatagagccaaaccttcatgtttgactcttccagacggcgtatgctaggctggacaggtagccagctggacgcaaggccagaaagtgctgacgcacttcccgacctcgcttaccatcagtctaccaaacacttaaagaccttaagggcttagcgctaagcagcttaacacttagcaccgagcccttgaggggctcggcatcagccctaaggtacttatagtaactttaaaaccttaagagcttagcctttaaggatctaagttactataaaagctttcagaacttagtacttaatactttaagtaaacataaaagcttttaagtcttaaagtaaatatataaccttaagacttaaacattaacacctaagttaagtataaaaccttaaaggcttagcacgtaaggatctaaacttaacatcagtgtttaagactttaaaacttaaaataaaccataaagacttaaagacttataagctttaaacacttaaagtaactataagactttaaagaccttaagtacttaaagttaaccatcagtcttaaactttaatcttataacctataagtcttaaagcttataagttataaaagtttttagaagagtaaaggggttaacttctttacttctcttctctctttggttctttctctcttctcttcttttcttcatcaggggagaagaggaaccttttgccatcagcgctgatgggttttcgccgtgtgtctcgtgtgctcctggtcgcacgctcccgtcgcacactccccacactcttacacccgtgtccctttcaggcttagcgtgttcggctgaaggcgtacggcgtgtcacgctaacacccttaacatcaggtgagacttaaagtgtatattatatgtagaagactttaaaacctttaagggtgtacacgtttaggctgtgtccaacactgctaggcgcgaagtgctaagccttaaagcgctaacacacacccacccccatttttcttccgtgtccttttctttttgacaccgctggggggcgatgtgatctttctcacacccgtgggggtaggagagaaaaacaaacaccccaccacgatcacaaccccccaccaaacgaacaaaacagcccccagaatcgactagtagggcacaggtggggtaaacctaccccggacacattccaggctgttacagagacaacgagaagcttacaagggcttgggtgatgaggaggcgcgatggcacacaccaaccgcaccgcatcctccgcccaccgacgctggcgcgagcgactcatcacccaagcccgacaacaaggccaaaccgaatgcccactctgcggagcaaccatcacctgggacactcaccaactaccaaccagccccgaagccgaccacatcacacccgtcagccggggaggactcaacaccctcgacaacgggcaaatcatctgcagaacatgcaacagaagcaaaggcaatcgcagcgaaccaaacatcagtttccaacaacaaaccacaaaaacccttgtcacctggtgaaaaaccagccaacccccgacggggaccaccccctgcacacccgtgcaagacc

SEQ ID NO: 39 - DNA, 29512 bp, Bacteriophage of P. acnes
agtgaaatacctcccctttgttgttttatcgttttgtcgactttttgtttggtggtgatggtggtgcagcctgagcttcccgagtctcgtgagtggtgtgaggagacgcgtcgttggtggcgtgtgtggggtgaggatgcgcgtgctgggtttgtgtctgatgaggagtggctgtttctcatggatgctgcggtgattcatgatgtggtgtggcgtgagggtcgcgcggaccttgtggcttcgcttcgtgctcatgtgaaggcgtttatgggcatgttggatcggtattcggttgatgtggcgtctggtggtagtggcgggggttctgcggtggcgatgattgacaggtatcggaagcgcaagggggcctgattaggtgtctggtgtggttggttctcaggttcctcgtcatcgtgtggcggcggcgtattcggtgtctgctggtggggatgctggtgagcttggtagggcgtatgggttgtcgcctgatccgtggcagcagcaggtgttggatgattggcttgctgttgggacgaatggccgtttggcgtctggtgtgtgtggggtgtttgtgcctcggcagaatggcaagaatgctattttggagattgtggagttgtttaaggcgactattcagggtcgccggattttgcatacggctcacgagttgaagtcggctcgtaaggcgtttatgcggcttcgatcgttttttgagaatgagcggcagtttcctgacttgtatcgtatggtgaagtcgattcgtgcaacgaatggtcaggaggctattgtgttgcatcatccggattgtgccacgtttgagcgtaagtgtggctgtccgggttggggttcggttgagtttgtggctcgtagccgggggtctgctcgcgggtttaccgttgatgatttggtgtgtgatgaggctcaggagttgtcggatgagcagttggaggctttgcttcctacagtgagcgctgccccgtctggggatcctcagcagatttttttgggtaccccgccggggccattggctgatgggtctgtggtgttacgtttgcgtgggcaggcgcttggtggcggtaaacgtatcgcgtggactgagttttcgattccggacgagacggatccggaggatttgtctcggtcgtggcggaagcttgctggggatactaatcctgcgcttggtaggcgtctgaattttggtaccgtgtctgatgagcatgagtctatgtctgctgccgggtttgctcgtgagaggcttggttggtgggatcgtggccagtctgctgtgtcggtgattcctgccgataagtgggcgctatcggcggttgatgaggtgcatctttctggtgggaaagtgtttggggtttcgttttctcgttctggtaatagggttgctttggcgggtgctggcagggcggatgctggggttcatgttgaggttattgatggcttgtcggggacgattgttgatggtgtaggccaactggctgattggctggcgttgcgttggggtgacacggaaaagattatggttgccggttctggtgcggtgcttttacagaaggctttgactgatcgtggtgtgccgggtcggggcgtgattgtggccgataccggtgtttatgttgaggcgtgccaagcttttctggagggtgtgcgttcgggtgttgtttctcatccccgtgctgattctcgccgtgacatgttggagattgctgtgaggtcggcggttcagaagcgtaagggatctgcttggggctggggctcgacgtttaaagacggcagtgaggttcctttggaggctgtgtcgctggcgtatcttggtgtgaagatggcgaaggctaagcggcgtgagcgtagtggtaggaagcgggtgtctgtggtatgaacgtggacgagttggctcttattgagggcatgtacgatcgtattaagaggttgtcttcgtggcattgccgtattgagggctactatgagggttcgaatcgtgtccgtgatttgggggttgctattcctcctgagttgcagcgtgtgcagacggtggtgtcgtggcctgggatagcggtggatgctttggaggagcgtctggattggcttggctggactaatggtgacggctacggtttggatggtgtgtattctgcgaatcggcttgctacggcgtcgtgtgatgtgcatttggatgcgctgatttttggtttgtcgtttgtggctgttattccccaagaggatgggtcggtgttggttcgtccgcagtcaccaaagaattgcaccggaaagttttcggctgacgggtcgcgtcttgatgctggcctggtggtgcagcagacgtgtgatcctgaggttgttgaggcggagcttttgcttcctgatgtgattgttcaggttgagcggcgggggtctcgtgagtgggtcgaggtgggccgtataccgaatgtgttgggtgcggttcctttggtgccgattgtgaatcggcgcaggacgtctcgtattgatgggcgctccgagattacgaggtctattcgtgcttacacggatgaagcggttcgcacgctgcttgggcagtctgtgaatcgtgatttctatgcttacccgcagcgctgggttacgggtgtttctgcggacgagttttctcagcctggctgggtgttgtctatggcttctgtgtgggctgtggataaggacgatgacggtgatactccgaatgttgggtcgtttcctgttaatagtcctaccccttattctgatcagatgcggctattagcccagttgactgctggggaggctgcggtgcctgagcgctatttcgggtttatcacgtctaacccgccgtcgggtgaggcgcttgcggcggaggagtctcgactggttaagcgtgctgagcggcgtcaaacatcgtttggtcagggctggctgtcggttggttttctggctgcgaaggcgttggattctcgcgtggatgaggctgcttttttcggtgatgtgggtttgaggtggcgtgacgcgtcaaccccgactcgggcggctacggcggatgctgtgacgaagcttgtgggtgccggtattttgcctgctgattctcggacggtgttggagatgttgggtttggatgatgtgcaggttgaggctgtgatgcggcatcgcgccgaatctgcggatccgttggctgcgttggctggggctatttctcgtcaaactggcgaggtttgatggatggcttcgggtgtgatgtcgaggctggcggcgactgagtatcagcgtgaggcggtccggtttgccgggaagtatgcgggctattatgccgagcttggtcgtttgtggcattccggaaaaatgagtgacacgcagtatgtgcgtttgtgtgtcgagttggagcgtgccggccatgatggttcggcgtcgttggcggcaaggtttgtgtcggattttcgccggttgaatggtgtggatcctggtttgattgtgtatgacgagtttgatgctgctgctgcgttggcccggtcgattgcgaccacgaagattttgaagggtgatccggatagggcgaatgatactattgatgcgatggcggcgggttttgatcgggctgtgttgaatgctggccgtgacacggttgagtggtcggcgggtgcgcagggccggtcgtggcgtcgtgtcacggatggtgatccgtgtgctttttgtgcgatgcttgcaaccaggtcggattatacgactcgggagcgtgcgctaaccgtggggcatactcggcgtcataggcggggtggtaagcgtccgctgggttcgaagtatcatgatcattgtgggtgtacggtggttgaggttgttgggcgttgggagcccagttccgcggacaccgcatatcagcgggtttatgagaaggctcgtgagtgggttgatgatcatgggttgcagcagtcgcctggcaatattttgaaggctatgcgtactgttggcgatatgagatgattgatatggtttccggttgtgcgccgccggttatcggtgcacgtggttgtctcccgcacggggggcggcaagattgtgttgttttccgcaaggagtgtagggttaggctatggccgatcagaatgttgaagaacaaaacgtcgacaaagtagaagaggttcccgaaaagggtgacgttgttgacgtcgtaaaggatgatcaaagcgggcagacaggcgatcagtcgaagcatgatggtggagataagccgtctgggactgattggaaggctgaggctcgtaagtgggagtctcgtgctaaaagtaatttcgccgagttggagaagcttcgcgcctcggatggtgatgcggggtctactattgatgagcttcgccgtaagaatgaggagctcgaagaccggattaatgggtttgttcttgagggtgtgaagcgcgaggtggctgccgagtgtggcctttcggccgatgcggtagcttttctgtctggcggtgatcgcgagtcgcttgccgagtctgctaaagcccttaaggggctgattgaccatagtggtagtggtggcgcgggtgtgcgccgtcttgcggggagtgcccccgtggatgatgttaaacgacgtgagggtgtcgcgtttgtggatgctcttgtcaataattctaggagatgatttatcatggctgacgattttctttctgcagggaagcttgagcttcctggttctatgattggtgcggtgcgtgaccgtgctatcgattctggtgttttggcgaagctttcgccggagcagccgactattttcggacctgtgaagggtgccgtgttttcgggtgttcctcgcgccaagattgttggtgagggcgaggttaagccttccgctagcgttgatgtttccgcgtttactgcgcagcctatcaaggttgtgactcagcagcgtgtctcggacgagtttatgtgggctgacgccgattaccgtctgggtgtgcttcaggatctgatttcgcctgctctgggtgcttctattggtcgcgctgtggatcttattgctttccatggtgttgatccggctacaggtaagccggctgctgctgttaaggtgtcgctggataagacgtcgaagacggttgatgccacggattctgccacgaccgatctggtcaaagcggtagggctgattgcgggtgctggtttgcaggttcctaacggtgtcgccctggatccggcgttctcgtttgcgctgtctaccgaggtgtacccgaaggggtctccgcttgccggtcagccgatgtatcctgccgccggtttcgctgggcttgataattggcgtggacttaatgttggtgcttcttcgactgtttcgggtgccccggagatgtcgcctgcctcgggtgttaaggctattgttggtgatttctctcgtgttcattgggggttccagcgtaacttcccgatcgagctgatcgagtatggcgatccggatcagactgggcgtgatcttaagggccataatgaggttatggttcgtgctgaggctgtgctgtatgtggctatcgagtctctggattcgtttgctgttgtgaaggagaaggctgcaccgaagcctaatcctccggccggtaactgatttattgtagcggtgatatgtatatgtgcagggggtggtgttgatgggtatcattttgaggcctgaggatattgagcctttcgccgatattcctaaagataagcttgaggcgatgatcgctgatgtggaggctgttgctgtcagtgtcgccccctgtatcgctaaaccggacttcaaatacaaggatgctgccaaggctattctgcgtcgtgctttgttgcgctggaatgatactggcgtgtcggggcaggtgcagtacgagtctgcgggaccgtttgcccagactacacggtctaatacgcctacgaatttgttgtggccttctgagattgctgcgttgaagaagctgtgtgagggtgacggtggggctggtaaagcgttcacgatcacacccacgatccgtggcggatatgcacattctgaggtgtgttctactgtgtggggtgagggctgttcgtgcgggtcgaatattaacggctacgctggccctttgtgggagatatgatatgattaattttccttacggtgaaacggttgtgatgcttcagccgactgttcgtgtcgatgatcttggcgacagggttgaggattggggccatcctgtagaaaccgtgtaccataatgtggccatctatgcttctgtgtcacaggaggatgaggctgccggccgtgacactgattgggagcattggtcgatgctgttcaagcagcctgtcaagggtgccgattatcggtgtcgttggcgtattcggggtgttgtgtgggaggctgacgggtctcctatggtgtggcatcacccaatgtctggctgggatgctggtacgcaggttaatgtgaagcgtaaaaagggctgatggttgtggcacgtgatgtgaatgtgaagcttaacttgccgggtattcgtgaggtgttgaagtcttctggggtgcagggcatgttggctgagcgtggcgagagggtcaagcatgcggcctctgctaatgtgggtggtaatgcttttgataaggcccagtatcgtgccgggttgtcgtctgaggtgcaggttcaccgtgttgaggctgtggctaggattggcaccacctataagggtggtaagcgtattgaggcgaagcatggcacgttggctaggtcgattggggctgcgtcgtgatcgtttacggtgatcctcgtgtgtgggctaaacgtgtgctcaaggatgatggctggctgtctgatataccgtgcacgggtactgtgccggatcaatttgagggtgacctgatttggcttgcgttggatggtggcccccagttgcatgttcgtgagcgtgtttttcttcgcgtgaatgtgttttcggatattccggatcgtgctatgtcgttggcgcgtcgtgttgaggctgtgctggctgatggtgttgatggtgatccggtggtgttttgtaggcgttctactggtcctgatttgttggttgatggtgcacgttttgatgtgtattcgctgtttgagctggtgtgccgtcctgtcgaatccgagtaaacgtatttgttttctatattttgtttttgtttgattatttttgggggttgtgatggctgctacacgtaaagcgtctaatgttcgctctgctgttaccggtgacgtctatattggtgccgctcacgccggtgacactattgatggtgttgggaagattcctgacggtcttaccgctttagggtacctgtcggatgacgggtttaagattaagcctgagcgtaaaacggatgatttgaaggcttggcagaatgcggatgttgttcgcaccgtggctacagagtcgtctatcgagatttctttccagctgatcgagtccaagaaggaggttatcgaactgttttggcagtcgaaggttactgccggagtcgattcgggttcgttcgatatttctcctggtgctacgaccggtgttcatgccctgttgatggatattgttgatggcgatcaggttatccgctactatttccctgaagctgagcttgtcgatcgtgacgagatcaagggtaagaatggcgaggtgtatgggtatggtgtcacactgaaggcgtatcctgcccagattaataagaagggtgatgcggtgtctggtcgggggtggatgacggctttaaaagctgatactcctccggttcctccgaagcctccgaagcctgagccggatcctaatccgccagccgagaactgatacatatttttgagggattgttgatagatgagtgacacaggtttcacgttgaagattggtgaccgtagttgggtgttggctgatgcagaggagacggcgcaggctgttcctgcccgtgtttttcgccgtgccgctaagattgcccagtcgggggagtctgctgatttcgcccaggttgaggtgatgttttctatgttggaggctgccgccccagcggatgctgtagaagcgcttgagggcttgcctatggtgcgtgttgccgagattttccgtgagtggatggaatacaagcctgacggtaagggtgcctctttgggggaatagtttggctccacggcctgattgatgattatcgtggggccatcgaatatgattggaggacccggttcggttgctctgtttatgatgttggtggcccggtgatgtgttggggtgaggctgtccggctggctggcgtgttgtgtactgatacgtcgagccagttggcagcccatctgaatggttggcagcgcccgtttgaatggtcggagtgggcggtgttggatatgttggatcattacaggtctgctaatagtgaggggcagccggagcctgtggcgaggccgacggatgagcgtcgggctaggtttacgtcgtctcaggtggacgatattttggcgcgtgttcgtgccggtggcggggtgtctcgcgagattaatattatggggtgaatagtgtatgtctggtgagattgcttccgcctatgtgtcgttgtatacgaagatgcccggtttgaaggctgatgttggtaaacagttgtcgggtgtgatgcctgctgagggtcagcgttcgggtagtctttttgcttccggtatgaagttggctttgggtggcgcggcgatgatgggtgccatcaatgttgccaagaagggcctgaaatcgatttatgatgtgactattggtggcggtattgctagggcgatggctatcgatgaggctcaggctaaactgactggtttgggtcacacgtcttctgacacgtcttcgattatgaattcggctattgaagctgttactggtacgtcgtatgcgctgggtgatgcggcttctactgcggctgctttgtctgcttctggtgtgaagtctggcgggcagatgactgacgtgttgaagactgtcgccgatgtgtcttatatttctggcaagtcgtttcaggatacgggcgctattttcacgtcggttatggctcgcggcaagctgcagggcgatgacatgttgcagcttactatggctggtgttccggtgttgtctttgcttgcgaagcagacgggtaaaacgtcggctgaggtgtcgcagatggtgtcgaaggggcagattgattttgccacgtttgcggctgcgatgaagcttggcatgggtggtgctgctcaggcgtctggtcagacgtttgagggcgctatgaagaatgttaagggcgctttgggctatcttggtgctacggctatggccccgtttttgaatgggttgcggcagatttttgttgcgttgaatccggttatcaagtcggtcacggattctgtgaagcccctgtttgcgtcggtggatcaggggattcagcgggtgatgccgtctattttggcgtggattaatcgtatgccgggcatgattacgagaatgaatgcacagatgcgcgccaaggtggagcagttgaagggcatttttgcgagaatgcatttgcctgtccctaaggtgaatttgggtgccatgtttgctggcggcaccgcagtgtttggtattgtggctgccggtgtggggaagcttgttgcggggtttgccccgttggcggtgtcgttgaagaatttgttgccgtcgtttggtgctttgaagggtgccgctggcgggcttggcggcgtgttccgtgccctgggtggccctgtcgggattgtgatcggcttgtttgctgccatgtttgcgacgaatgtccagttccgtgcctctgtgatgcagcttgtgggtgttgtcggtcaggcgttggggcagattatggctgctgtgcagccgctgtttggtttggttgcgggtgttgtggcccagttggcgccagtgtttggccagattattggtttggtggctggtttggctgcccagctggtgcctttgattagtatgcttgtcgcccggctagttcctgtgatcacgcagattattggtgcggtgacacaggttgcggccatgctgctgccagcactgatgccggtgttgcaggctgttatggctgtgatacggcaggttgttggcgtgatcatgcagcttgtgccggttttgatgcctgtgattcaacagattttgggtgctgtgatgtctgttctgccgcctattattggtttgatacggtcgctgataccagtcatcatgtcgattatgcgtgtagtgatgcaggttgttggtgccgtgttacaggtggtggcccgtattattccggttgtggctccggttgttggggctgtgatagggtttgttgcacgtattcttggcgctattgtgtctgccgcagcccgcattattggcgctgtaacccgtgttatcggatgggttgtgagccatctggtgtctggtgtggcgcgtatgggtacggccatcctgaatggctggaatcatattagggctttcacgtctgcgtttattaacggtttcaagtcgatcatttcgggcggcgtgaatgctgttgtggggttttttgcccggcttggttcttcggtggctagccatgttcggtctgggtttaacgcggcccgtggtgctgtttcttccgcaatgaatgctatccgtagtgtggtgtcttcggtggcgtctgctgttggcgggttcttcgggtcgatggcgtctagggttcgtagtggtgctgcgaggggctttaatggggccaggagtgcggcttctagcgctatgcacgctatgggttctgcagtgtctagcggtgtgcatagtgtgttggggttttttcggaatctgcccggtaatattaggcgtgctctcggtaatatgggatccttgttggtgtcggctggccgtgacgtggtttctggtttaggtaatggtatcaagaatgctttgagtggcctgctggatacggtgcgtaacatgggttctcaggtggctaacgcggctaaatcggtgttgggtattcattccccgtctagggtgtttcgtgatcaggttggccgccaggttgttgccggtttggctgaggggatcaccgggaatgctggtttggcgttggatgcgatgtcgggtgtggctggccgtcttccggatgctgtggatgcccggtttggtgtgcgatcgtctgtgggctcgtttacaccgtatggcaggtatcagcgtgcgagcgagaagagtgttgtggtgaatgttaacggcccgacgtatggtgatcctaatgagtttgcgaagcggattgagcggcaacagcgtgacgcgttgaacgcgttggcttacgtgtgagtgggggtgttgtgcatgtttattcctaacccgtctgatcgtgccggtttgactgttacctggtctatgttgccgttgattggtaatgatccggagcgtgtgcttcatttgacggattatacgggtgcgtctcctgtcatgttgttgaatgattcgttgcgtggtttgggtgttcctgaggtggagcatttttctcaaactcatgttggggtgcacgggtctgagtggcgcgggtttaatgtgaagcctcgcgaggtgacgttgcctgttttggtttcgggtgttgacccggatcctgcgggcgggtttcgtgacggttttttgaaagcctatgacgagttgtggtctgcgtttcccccgggcgaggtgggggagttgtctgtgaagactcctgccggtgttgagcgtgtgctaaggtgtcggtttgattcggtggatgacacgtttacggttgatccggtgaatcgtggctatgcccgctatgtgcttcatttgatagcctatgacccgttttggtatggggatgagcaaaagtttcgtttcagtaacgcgaagttgcaggattggttgggtggcggccctgtaggcaaaaacgggactgcgtttccggtggtgttgacgcctggtgttggttcgggttgggataacctgtctaataagggtgatgtgcctgcgtggcctgtgattcgtgttgaggggcctttggattcgtggtctgtgcagattgatggtttgcgtgtgtcatcagactatccggttgaggagtttgattggatcacgattgatacggatcctcgcaaacagtctgcattgttgaacgggtttgaggatgtgatggatcgtttgaaggagtgggagtttgctcctatcccgccaggcggttctaagagtgtgaatattgagatggttggtttgggtgccattgttgtgtcggtgcagtacaggtttttgagggcttggtgaatagttgatggctggtcttgtcccgcagataacattgtttacgccagactatcgtcgtgtggcgcctatcaatttttttgagtcgctaaagttgtcgttgaagtggaatggtttgtcgacgctggagttggtggtgtcgggggatcattccaggcttgacgcgttgacgaagccgggtgcacgccttgttgtcgattatggtggtggccagattttttctgggcctgtgcgtaaagtgcatggtgtgggtccttggcggtcttcgagggtgactatcacgtgtgaggatgatattcggctgttgtggcgtatgttgatgtggcctgtgaattatcgtcccggtttggtgggttcggagtggcgtgccgaccgtggttatgcccactattcgggtgcggcggagtcggttgctaagcaggtgttgggggataatgcgtggcgttttccgccaggtttatttatgaccgatgatgagcgtcgtggccgctatattaaggattttcaggtgcggtttcacgtgtttgccgataaattgttgccggtgttgtcgtgggctcggatgactgtttcggtgaatcagtttgaggataaggtgaatgatcagcggggtttagtgtttgattgtgtgcccgcggtgacgcgtagccatgtgttgactgccgagtcgggttcgattgtgtcgtgggagtatgtgcgtgacgcccctaaggctacgtcggtggttgttggtggccgcggcgagggcaaggatcggctgttttgtgaggatgttgattcgatggctgagggggattggtttgatcgtgtcgaggtgtttaaggatgcccgtaacacggattctgagaaggtgtctctctttgatgaggctgagcgggtgttgttcgagttaggggccacgtcggggtttaagatcgagttggccgagtcggatgtgttgcgttttgggcccggcaagctgatgcccggggatttgatttatgtggatgtgggttctggccctattgcggagattgttcggcagattgatgtggagtgtgattcgcctggtgacggctggacgaaggtgactcctgttgcgggggattatgaggataatccgtctgccctgttggctcgccgtgtggctggtttggctgcaggtgtgcgggatttgcaaaagttttaaaagtgatgggggtttgttgtgggtattgtgtgtaaagggtttgatggtgtgttgaccgagtatgattgggctcaaatgtctggtctgatgggtaatatgccgtcggttaaggggcctgacgattttcgtgtcggcactacggttcagggtgccacggtgttgtgtgaggttttgccggggcaggcttgggctcacggggtgatgtgcacgtcgaatagtgtggagacggtgacggggcagctgcctggtcctggtgagactcgctacgattatgtggtgttgtctcgggattggcaggagaatacggccaagttggagattgttcctgggggtcgtgcggagcgtgcccgtgacgtgttgcgtgccgagcctggcgtgtttcatcagcagttgttggctactttggtggtgtcgtctaacgggttgcagcagcagttggataggcgtgccgtggcggctagggtggcgtttggggagtctgcagcctgtgatccgacacccatggagggggatcgtgtgatggttccttcgggggccgtgtgggctaatcatgctaacgagtggatgttgttgtctcccaggattgagacgggttcgaagtcgatcatgtttggcgggtctgctgtgtatgcttacacgatcccgtttgatcgccagttcagtagtccgcctgttgtggtggcgtctatggctacggcggctgggggtacgcagcagattgatgtgaaagcctacaatataactagcaaggattttggtttggcgtttatcacgaatgatgggtctaagccgaatggtgtgcccgctgttgcgaattggatagctgtgggcgtgtgaccgtgttgaggctgtggtggcggttggtgtgatgttggggggctgtggtgtcgtggtttactcctgcactggtggcctctatttgtaccgcgttggctactgttttgggttcggttcaggctgtcacatctaagtctaggaagcgtttgaggcgcctgtctgctcaggtggatgcgatggaagagtatacgtggggtgtgcggcgtgaggttcgccggtttaacgctggtcttcccgataatgtggatcctttggtgttgcctgatccgcccgggtttttgcaggatcagttggggggtgaatagatgagggagttggaggaggagaagcggcagcgccgtacttttgagaaggcttctatggtgttgttgtttctgtcgcttgtgctgttggcggtggttgctgggggtgctttgcgtttcggctctgtggtttcgcagagggattcggagcaggcgcgtgcggagtcgaatggtactgcggctaaagggttggctgcccgtgtgaagcaggtgtgcgcccagggtaggcaggagtcggtgcgtcttcaccggtctggcctgtgtgtggatgctgcccgtacggagcggagtgttcagggtgttcctggcccggctggtgagcgtggcccgcaaggccctgccggtgtggatggccgtgatggcagtaatggttcggctggtctggttggcccggttggcccgcagggttctcctggtttgaatggtgtgaaggggcctgacgggttgcccggtgctgacggcaaggatggccatggtggtgttccgggccgtgcaggtgatgacggtgtgaacggtgctgatggtcgggatggttcggccggtgaacgcggtgatgtgggcccttcaggttccgccggtccacagggtgaacggggtgagcgcggcccgcaaggccctgccggtgtcaacggatccgatggtaaagacggtaaggatgggcgtgatggccgctcggtggtgtctgtgtactgctcggagggccgcctgtttgtgaaatatagtgacggtgcgtcttctacagtgtcagggtctagggcgtgcccgggtgtggccccgtcgccgattgtgaccgtgtcatcccacaaatagtaagaggaagggtgttactagtgttgatgatgttttggggtggtgtgcggtgagatacattccagcggcacaccattcggctggttctaattctccggtgaatagggttgtgattcatgcgacgtgcccggatgtggggtttccgtccgcctcgcgtaagggtcgggcggtgtcgacggcgaactatttcgcgtccccatcgtctggtggctctgcccattatgtgtgtgatattggggagacggtgcagtgcctgtccgagtctactattgggtggcatgccccgcctaatccgcattctttgggtatagagatttgtgcggatggcggttcgcacgcctcgttccaggttccggggcacgcgtatacgcgggagcagtggctgtcgcctgaggtgtggcctgcggtggagcgggctgctgtcctgtgtaggcggttgtgtgaccggcatggtgttccgaaacggaagctgtccgtatcggatttgaaggccggcaagaggggtgtttgcgggcatgtggatgttacggatgcgtggcatcagtcggatcatgatgatccggggccgtggtttccgtgggacaggtttatggccgtagtctgcggccacgatagtggtagtgatagtggggagttaactgtggctgatgtgaaagcgctgcatgatcagattaaacaattgtctgcgcagcttactggttcggtgaacaagctgcaccacgatgttggtgtggtacaggtgcagaatggtgacttgggtaaacgtgtcgatgccctgtcgtgggtgaagaatccggtgacggggaagctgtggcgtacgaaggatgctttgtggagtgtctggtactatgtgttggagtgtcgcagccgcattagcaggcttgagtctgatatcaatagtttaaagaagtgatgtgtggtgggtaaacagttttggttgggcctgttagagcgcgccctgaaaacttttattcaaacgtttgttgctgtgcttggggtgactgcgggtgtcacctataccgcggagtcgtttcgtgggcttccgtgggagtcagctttgatcacagccacggtggctgctgtgctgtctatagcgacttcgtttggtagcccgtcgtttgtggccggtaaacccaaggttgctccggttgttgatgccggtcttgttccacccgatgataccggcctggtagaaccgcatgcggttgacgaaacggatcctggcatgatcgagccgatggatgatgataatgtggactatgtgccgaggcgtgcatccgagtctgaggttggcacggtagagccgtcagaatcataagtgaatatagtgtgtgccccagcggtgctgccacgtgtgtggtggctgctgctggggcactatttttgtgtctactgtatggctatgattcgttgttgtcgatggtggcttcgagcatctggtgcaggtgttcacactcggatatggtgtcacgggcttgatctaaaatgtctcgccggatcacgtttttgtggttgttgctgaggctgataagcgaacacatgatatcgtcggcggcggattgtagtagtttggcctggtatgcgattccggcgagccagtctatggcttccgggcttgcctgtgtgttgtctggcatgccactggtgttgctgttgtttgtggggtatcctgcactgtcgcagtcccacaggatttcgctgcactcgtctagcgtgtcttgatcgatgttgaggttgtcgaggctgacttctttgatggtgagatttacatcatctaaagagatgtggacgtggtattcgtcttgaatgtcggccacaatgttttccagctggttcatgttggtgggctgttgttggatgattcggtgtaccgctgttttgagggcagcgtgggggatattggttgtgttgttcatggttttatttcatccctgtactatcgtcgtctatgtatgatgttgtgttggcgtatttggtgagtgtgatcagtgtttggtctgcccactgtttcaccgtctgcctagtcacacccaatcgctgggctgccaccgaataggtttgatcatacccgtatacttccctgaatgcagccagccgtgccagccgtttcctctgtttggatggttcacaggtgagggtgtagtcgtcgatggctagctgtaggtcgatcatggtaacaatgttgttgccgtggtgttgtggagcggttggcgggggtggcatacctggctctactgatggtttccatggtccgccgttccagatccattgggcggcttgaatgatgtcggctgtggtgtaggtttggttcatgtgtcacccccggaacaggttgtcgaggttgtctaggttggggctggtgtttgtggtgtcgaatcgtcctacgcagtggcagtagtcgtacatgagtttaataatgtgttgatggtcaccaaggtaggtgttgccgctgatgctgtaggtggctgtgccgtctttgctgatggtgtatttggcggtgatagtttcgggtgtttcggtgttggtgatgatggcggtggtggtggtgcctactgtttggagtacggtggtttgggttccgtcgtcgagggttgtagtaaccataatgggggttctccttttagttgctggtttgattgtcggctatagtggtgatttcttgcaccggtttggggagatccaaatgctgtatggttttgttggctagccgtttggctaccctgtagcacattttggtgtagtgtttgttgtctaggttgtggtattgttctcgcaccgcaatatatagtagggagtcttggtacaggtcgtctgcgctgattgcggggtagtgttcggctattttggcgcatgcccggttgagtgtgcgtagatgatggtctgtggcccatccccacgatgctgtggtggccaggtctgcttttgttggtcgtctactcatgacactatttcatctcgctatctggtagttgtttggtgttttgttgttgatagtgtagcacacgagtccggggttgccggtggtgcctgtgcggtgccggtaccagacggattctccttccatggatgggcattgaataaaggtgcgttgtccttgctcggagatttctaggtggtgccggtgtcctgccatgaggatgtgggatgtggtgccgttgtggaattcttggcctcgccaccattcgtagtgttggttgttgcgccattggtggccgtgggcgtgaaggattttggtgcctgccacatcgacggtagtggtcatttcgtcccggctagggaagtggaagtgaaggttgggatattggttgttgagctggtaggcttctgcgatggcccggcagcagtccacgtcgaaggagtcatcgtaggtggtgacgcctttaccgaatcgtacggcttccccatggttgcctgggatggatgtgacggtgacgttggggcagtggtcgaacatgtggatgagttgcatcatggccatgcgggtgagcctgatttgttccgtcaagggtgtttgtgtgcgccaggcgttgttgcctccttgtgacacgtatccttcgatcatgtcgccgaggaaggcgatgtggacccggccgggtttgcctgcctgttgccagtagtgtttggcggctgtgagggatcgaagatagtcgtctgcgaagtgtgctgtttcaccctgagggatgcctttgccgatttggaagtcgcctgcccctaccacaaacgcacaatcactgttgttgctggtggtgtcggctggtttggggggctgccagtcggctagcttgtcgacgagttcatccacgggatacgggtctgttgcgggttggtggtcgatgattttttgtatggatcggcctgtttctccgttggggagtgtccattcggagatgcgtgtgcggcgtacggttccattggctagatcgtcgcagatggtgtctgcttcgtcattgtgctgggctagctgtgtgaggagccggtctatattgtctatcactggttttcctcctctttctgggtgttggtttgttggcggcgatagtctttgataacggtggcggagatggggtatcctgcctgggtgagctgtttcgctagccacgaggctgggatggttttgtctgcgagcacgtcggctgcttttgccccgtagcgttgaataagggtttcagttttggttgccatgatatcctatcggttgtgtggcgggctgccatcctgtgcggcagtcgccgtcgtgtcctggtttgcgtgtgcaccaggatatggttccgtctgtgtggttgagtgttttgccgcacatgacgttttgtagatgctctggcagtgcgccgtcaccctggttgctggtttgtgtgtcgaagagtgttttctggttagtgaaatgctcggatacggtcccgttgtggacgggtagtatccatgttttccattgctgctgtagcctggtgttccagtggaattgtttggccgcgttttctgcctgttttaaggttttgtagtagccaacgagtatgcgctggtgttgctggtcgggagggtttgggcctcgccagtattgtgcggccacggcgtagcggttgctggctgtgaaggtgttccagcagtattcgataatgttgttgagtgtgtcgtctgtgaagtcgtctgggttgtgttctgttgcctgggtgataatgccgcggatggcttgccggtttttggtggcgggtttgaacgagatgctcacgatagtaccggcttgtcgtcttgcatgaactggttgaaggtgttgttcccggcgtgttgggcttgtgtgatgtcctggtcggtccagtcggggtgttgctgtttcagatagtaccagtggcacgcattgtaggtttcgtcttgtagccgtgtgagatggttttcggtgatgatttgtttccacattgtccatgacacgtcgagccggttgaggatttcgagggctgggatgttgaattggttgaggaagaggatttcgtaggtgtagtagtttttctcgtattggtcccatccgcttcggtgcctgttgggctggtttttggggtaggcttcccggcatactttgtgtaaacgtttggccatgtcgtcgggtagtttaatgtcggggttggcgcggatcatggatcgcatcccatcataggtggtgccccaggtgtgcatgatgtaggtggggtcttcaccatcggcccatttttctgcacagatggcgaggcggatgcgcctcctggctgcttggctggtgttgcgccggttggtgatggggcacgtgtcgaggggatccatgatattttagtgtacctttcttggtttgggttgcttgtgtggttttattgtagcactgtgttgagggcttgtgtcaaccctgttttgccggttttcaggtaggtgtctgtgacatccccgagggtgaggggcacatgggtggcttggggaagtgctgtctggagagtttgggccatcttatctcccgcggggtcggggtcggaccagatgtaaacatggtcgtagccttcgaagaatttggtccaaaagttttgccacgaggttgcgccgggtatggcgacggcgggccatccgcattgttcgagtatcatggagtcgaattcgccttcacaaatgtgcatttctgctgccgggttggccatggcggccatgttgtagatggagcctgtatccccggccggggttaagtatttggggtggttgtgggttttgcagtcgtgttgtagtgagcagcggaaacgcatttttcttatttcggctggccgcccccaaacggggtacatgtaggggatggtgatgcactggttgtagtcttcgtggccggggatggggtcattgtcgatgtatccaaggtggtggtagcgggctgtttcttcgctgatgcctcttgccgagagaaggtcgagtatgttttcgaggtgggtttcgtagagggccgaggctttctggattcggcggcgttccgcaatgttgtatgggtgtagtgagtcgtacattcgggttttcttcttccaatcgttgttgtagcttggcgaggccgcctccaacaccgcatgtgtggcagtaccagacgcccttgtcgaggttgatgctcatggagggctggtggtcatcgtggagtgggcagaggatgtgttgctcgtttttggacgggttatagcggatgcgataggtgtcgaggaggcggcgggtgtcagaggtgtgggaggagctcgttgagggttgataccacataggcttcgctccatggcttgtttcgctgtttcatgatgactagtccgatggtggattggttttttttgttgcggtgggtttcatagttgcgtgcctcgattgtggcttctttcacgaattgggcgagatgctgctggccagccttggcttcgatcacataggttttgttgccggttttgaggatgaggtcgccttcgtcctctttgccgttgaggtggaggcgttctatatcgtagccggtgttgcgtagctggtgtaggagtctggtttcccactcggcaccggcccggcggttgcgtgactgttgtgaaaccatcatagtcctttatgttcttgtgtcatgttccatggctgtttttctaccaatggcccgaagaatgtgtattcggggtaggccctgagtctttcgtatcgggtgccgtctgggctagatttgccggtgcgctgtttcaacacagcaatgcgtgcctcggctggtatcgatagcccgttgccgttatcctcgccaccatacaatgagactccgaggatgagttgtggtttttcggagaggccgtttttgatctctcgtctggctggcgggtgttcgaggtcggtgccggttttgtcggtggcgtggtgtgtgacgatgatggtggagccagtatcccgacccaatgctgtgatccattgcatggcttcttgttgggcttggtagtcactctcgcagtcttggatgtccatcaggttgtcgatgacaataaggggtgggaaggtgttccacatttccatgtaggcttgtagttccatggtgatgtctgtccaggtgatgggtgactggaatgagaatgtgatgtgttggccgtggtggatgctgtctcgatagtattctggcccgtagtcgtcgatgttttgttgtatctgggtggtggtgtgttgggtgttgagtgagatgattcgtgtggaggcctcccagggtgtcatgtcacctgaaatatatagtgctggctggttgagcatggcggtgatgaacatggctagcccggatttttggctgccggaccgccccgcaatcatcaccaaatcccctttgtggatgtgcatgtccaggctgcggtagaggggttctagttgtggtatgcggggcagctcggctgctgtttgggaggctctctcgaaggatcgttgtagagagagcatcgggaccttatctatctatcggtggttgtgggtggtcagatggagtcgatatcgatatcagcctctgctgatgctgaagtgtcatatagctggccattatcgcgcttgtctacgtattcggcaaccttatcatagatggcgtcatcaaggggtttgagcacaaccgcgttgaacccgtttttggtgcgcacggtggcgagtttgaaggcctgctcctcgccaaggtatgcctctagatcgcggatcatggagtgtgggcggtcgttattgccgcgcgctttctcaataatagcgttggggatggtttctggggtgccgttgttgagatcgtctagggtgtggaagatggtgacgtcggcgtagatgcggtctgcgacctgtccgccgtagccttcagtgttgtgttcgacgtcgtggactttgaaggcgatggcggtggcatcctggtttttggacgggttgaagaaggtgctgctgttgttgtttcggtagttggcgagtcccataactgtatcctttactgtttgtgttgttttgttggtttgtgtcggtttttatcgggtgaggctgtttcgtttattcctgaaagcctctgacacgtccgggttgctggtgattgtctttttgtactgtttgaggaggtcggctagctgtgccttgcttgttgctttgttgattttgtcaataacgatggtgttttcttgggatgcgatgttgtctacatagtttttggctgcctggtcgtatcggtcttggagaatgatggaggcgctcgcgatcagtgttgccaaatcccagtctttagagacgtcgtcgtttttgagtcctcccagtaaatcaatgatggattgtttgatgtcttctgtggtgtctcctctgatgactgcccacggggcggcatagtctccaccgtatttgagtgtgatagtgatacgatcatccgtactgttggtgtcggtcactggttctccttatctttctcgagtggtgtgatggtggttttgatcgggtacctgtaggcgtccttgccgtctaccgcccagcaggcgtctcgtacggggcatcctttacacagggctgtgacgtgggggacgaagatgccttggcttattcctttcattgcttgactgtacatgcatgatacatgccggtaggtgttgttgtcaagatcgtacagttcggttgatgtgccctgctcgaccgattgctcgtatcccttggtggtggcgggtgtccaaaacatgcctttcgtcacctggatgccgtgttgggcgagcatgtaccggtaggtgtgcaactgcatagcatcgactgggatgcgcccggttttcaggtcgaggataaacgtttcgccggtgttggtgtcggtgaagatgcggtcgatatagccgacaatctgtgtgccgtcggcgagggtggtttcgactgggtattcgatgcctggctggccgtcaatggttgcggtgatgtattctgggtggtttcgcctccatgttttccaccggtcgacgaagatggggccatagtgtatccaccaatcatagtttttcttgttgggcccgcctgactcgcacatgtttttgcacaccctgccggagggtttaatctgggtgccctcttctttgaccagggcgatttgggtgtcgaacacattgttgaaggatgagagtttgtcgggcagtgcagggtattcgacggggttatacaggtggaggtcatgctgttcggttatgtggtgtatagcactgccggcgatggttgcataccaggtgtggtgttgggcatggtagccgtgggatagtcgccatttttcaccgcattcggcccactgtgtgagtgaactgtaggagatgtggcctggatgctggatggttttcggatattgtgctagaggcatgttagttgtttttgttccatgggttgcgggtgtcttggccggcctggtgttgctggtatgcgaggagtgtcaggcagtgccaggctgcatgggccagatgcggcagatgtgattcatagtcgaggttgtttccttgctgccaggctagtagatgtctgtagagggcgtcgatactgtgacaccaggggtatcctccggtccagttgttgtcgccgtatttggtggcgccgtatccggctacttcgccgagcgagtggagggatgcggggtcgatgagggagagcctgcatagtttcagttcttttttggcgccggtgttggggtcggtgtacatgcgggtgggctcatccatgagatgtgtgcgcctttcttgagtgggttactggttgttgtcgtgggctagggctacggcgagaatgatgatggcgagggtttcagcgatgatgatgggtgttgtgatcatttggtgtcgcggggatggtaggtgagggttgatgcgcctaggagggtggcgagggcgcaggctgcgatgattgcgcaggctgctttgtggctagtgcctgttgcgtacatccatgtgatgatgccgccttggatccatgcgaggctggtgaagaatgtttcgtaactgtgcagctcaatgttgttgttgcgtgtgttcatgcttgttcctgaatgatggtgttgatggttttgtaaatgttgtacaggtctgtttcgatggtttttagctggctgatttggtggtcgaggttgatgttcgggttgagggtgttgatgcgggatgcgatgtcggtggctgtgcgtagtgtgccgccggtgtggtgaatgatgtgtgccgtgtcggcgaggccggtggtgacggcgtagtgggagaggagaggcatgataggtgtgctttctttctggtcagcgtgaagggttgatggacatgtcctcaacctgcggcttgtcttcggtaccggacacttggcagaaaaccttcacttgtgccttggatgccccgggttgctttgcggtggcaccgtaggcgatggagaaggtgtctttgtgggcgccgatgactttgtgtaggaagaggtcgatgtcggggtttccgttccagttgacaccttgcgctgcagccatctgggtggctttctgattgcaggcgtgtgctgccgtaatcatagtgagcccggtggaggtttcttcaccgcgggcttgcgcctgccgatgagccttggcctgctcggcttgtagggagcggactgcttctgcctgcttggctgtcttctcagccttgcgctgctgtgcggttttgggggtccattcggtgttggctgtggtggcctgtggggctggctgtgatgcgagtggcgggttgtcgtcgggggctggtaggaaggaggctgcggcgatgatggcgagggtggctccggcgatggtgtagcctgttttcttgttcatgaccgtgttcccctctcgtggggtttgttcgttgctgacatgattaatcattccatgggtggcatcggctgtcaagctgcgctcatttgggttgagcgttccttgtgtggctaggtgttttatcgggcgaatagggttaacaggtggccaacattgatgcgtgtcacattccagtagagttgtgtcgcctctgcctgtgtgagtggtttccactggttgtggctgtatacggttccgtcggtggcgatgaacgtgtcggggcgcatcttgtggagttcggcttccacatgctgccggtaggcttcggcgaggccctcaaaatccatatggtcgcagtggaggttttcgaggcgtgtcaggtcgaagggtgtggggcagtcgtagctggcggggctgtagagctgggtgaagtggtcggcgatcttttgcacgattattcctttccggtgatggtgtgttggttgtttgatcgtgtggcttcggcgatgatggcgtccacgtcgattgtgtcgatgatgtagtagagttcctcggcctcgtcctcggtgagtggctgccagttgcgtggcccgtatatggcgccgtcgagggtgacggtccattgtgggcggatgagccggatggcttcttcgactttggcacggtatagacggcagatgatagacgtctgggtgttgcctatgttgtgccctgttaggtgtgcggggtggagtgggttgatttctgtcggcccgtagagggttgtgaaggatggtgtgatgagtgttccatccacggtgggtgctcctttctggattgtttgggttgttgtggtttttatggtgtgatggttgcaaccgtgagtcaaggctgcgctcattcagcttgagcgtttcatgaggggtgtggtgtatatcactgaagcctttattgctcctgtaagcgtcttaaatggtctgggggtaggattatgcaggactaaccctgctagtcgattctagggcccttctagggcgtctcaggggtatgtctgggtgatggtaggtgttgtagatcattcggacgctcgaggttgtcatacatgacgatggttggggtgttctatctgggcataggttccactccctgtagtgtgtgagatagaccacatttccctagcctagtgtccatcaccaacaccccgcagctgatctggcgtggagggtgtagcccagaaatgccgtttaaagcttctagggtacacctaggagcgccttgcagggtgggggctaggtatttatacccccagcacattctgatcgattctagacgcctataagagctcgatacgtgatcagatcaccagacgcagaccatcctcccccatcctgcttagctaagcctacactatgtggacagtgtaggatactgtaggggaagaaagacacggtacaagaaagaagggggaggatccgccttaaagtcttagcacttaaggttttagcgcttagcaccgagccccctcaagggctcggcatcagcaccaccaggctcagctcatcaggcacagcctgaaagaggtacacgccatcagggaaggcttgagagtacgaggagccctagcgacgagtactcgaaagcctgagggaacacccttagtactgatgggcctagcgtgttcggaaaagacacacgagtcaagtgtgacagtccatcaggggtgaaacccgttctggctaggggtttcagccctaaccacccttaaaggttacaagagtctaagaaaatttaagaaaactcttaggaagaaagttgtgttcatgtccacccaaaaacagccaaaatagccctcaaacccgctaatagagccaaaccttcatgtttgactcttccagacggcgtatgctaggctggacaggtagccagctggacgcaaggccagaaagtgctgacgcacttcccgacctcgcttaccatcagtctaccaaacacttaaagaccttaagggcttagcgctaagcagcttaacacttagcaccgagcccttgaggggctcggcatcagccctaaggtacttatagtaactttaaaaccttaagagcttagcctttaaggatctaagttactataaaagctttcagaacttagtacttaatactttaagtaaacataaaagcttttaagtcttaaagtaaatatataaccttaagacttaaacattaacacctaagttaagtataaaaccttaaaggcttagcacgtaaggatctaaacttaacatcagtgtttaagactttaaaacttaaaataaaccataaagacttaaagacttataagctttaaacacttaaagtaactataagactttaaagaccttaagtacttaaagttaaccatcagtcttaaactttaatcttataacctataagtcttaaagcttataagttataaaagtttttagaagagtaaaggggttaacttctttacttctcttctctctttggttctttctctcttctcttcttttcttcatcaggggagaagaggaaccttttgccatcagcgctgatgggttttcgccgtgtgtctcgtgtgctcctggtcgcacgctcccgtcgcacactccccacactcttacacccgtgtccctttcaggcttagcgtgttcggctgaaggcgtacggcgtgtcacgctaacacccttaacatcaggtgagacttaaagtgtatattatatgtagaagactttaaaacctttaagggtgtacacgtttaggctgtgtccaacactgctaggcgcgaagtgctaagccttaaagcgctaacacacacccacccccatttttcttccgtgtccttttctttttgacaccgctggggggcgatgtgatctttctcacacccgtgggggtaggagagaaaaacaaacaccccaccacgatcacaaccccccaccaaacgaacaaaacagcccccagaatcgactggtagggcacaggtggggtaaacctaccccggacacattccaggctgttacagagacaacgagaagcttacaagggctataggtgatgaggaggcgcgatggcacacaccaaccgcaccgcatcctccgcccaccgacgctggcgcgagcgactcatcacccaagcccgacaacaaggccaaaccgaatgcccactctgcggagcaaccatcacctgggacactcaccaactaccaaccagccccgaagccgaccacatcacacccgtcagccggggaggactcaacaccctcgacaacgggcaaatcatctgcagaacatgcaacagaagcaaaggcaatcgcagcgaaccaaacatcagtttccaacaacaaaccacaaaaacccttgtcacctggtgaaaaaccagccaacccccgacggggaccaccccctgcacacccgtgcaagacc

SEQ ID NO: 40 - DNA, 29503 bp, Bacteriophage of P. acnes
agtgaaatacctcccctttgttgttttatcgttttgtcgactttttgtttggtggtgatggtggtgcagcctgagcttcccgagtctcgtgagtggtgtgaggagacgcgtcgttggtggcgtgtgtggggtgaggatgcgcgtgctgggtttgtgtctgatgaggagtggctgtttctcatggatgctgcggtgattcatgatgtggtgtggcgtgagggtcgcgcggaccttgtggcttcgcttcgtgctcatgtgaaggcgtttatgggcatgttggatcggtattcggttgatgtggcgtctggtggtagtggcgggggttctgcggtggcgatgattgacaggtatcggaagcgcaagggggcctgattaggtgtctggtgtggttggttctcaggttcctcgtcatcgtgtggcggcggcgtattcggtgtctgctggtggggatgctggtgagcttggtagggcgtatgggttgtcgcctgatccgtggcagcagcaggtgttggatgattggcttgctgttgggacgaatggccgtttggcgtctggtgtgtgtggggtgtttgtgcctcggcagaatggcaagaatgctattttggagattgtggagttgtttaaggcgactattcagggtcgccggattttgcatacggctcacgagttgaagtcggctcgtaaggcgtttatgcggcttcgatcgttttttgagaatgagcggcagtttcctgacttgtatcgtatggtgaagtcgattcgtgcaacgaatggtcaggaggctattgtgttgcatcatccggattgtgccacgtttgagcgtaagtgtggctgtccgggttggggttcggttgagtttgtggctcgtagccgggggtctgctcgcgggtttaccgttgatgatttggtgtgtgatgaggctcaggagttgtcggatgagcagttggaggctttgcttcctacagtgagcgctgccccgtctggggatcctcagcagatttttttgggtaccccgccggggccattggctgatgggtctgtggtgttacgtttgcgtgggcaggcgcttggtggcggtaaacgtatcgcgtggactgagttttcgattccggacgagacggatccggaggatttgtctcggtcgtggcggaagcttgctggggatactaatcctgcgcttggtaggcgtctgaattttggtaccgtgtctgatgagcatgagtctatgtctgctgccgggtttgctcgtgagaggcttggttggtgggatcgtggccagtctgctgtgtcggtgattcctgccgataagtgggcgctatcggcggttgatgaggtgcatctttctggtgggaaagtgtttggggtttcgttttctcgttctggtaatagggttgctttggcgggtgctggcagggcggatgctggggttcatgttgaggttattgatggcttgtcggggacgattgttgatggtgtaggccaactggctgattggctggcgttgcgttggggtgacacggaaaagattatggttgccggttctggtgcggtgcttttacagaaggctttgactgatcgtggtgtgccgggtcggggcgtgattgtggccgataccggtgtttatgttgaggcgtgccaagcttttctggagggtgtgcgttcgggtgttgtttctcatccccgtgctgattctcgccgtgacatgttggagattgctgtgaggtcggcggttcagaagcgtaagggatctgcttggggctggggctcgacgtttaaagacggcagtgaggttcctttggaggctgtgtcgctggcgtatcttggtgtgaagatggcgaaggctaagcggcgtgagcgtagtggtaggaagcgggtgtctgtggtatgaacgtggacgagttggctcttattgagggcatgtacgatcgtattaagaggttgtcttcgtggcattgccgtattgagggctactatgagggttcgaatcgtgtccgtgatttgggggttgctattcctcctgagttgcagcgtgtgcagacggtggtgtcgtggcctgggatagcggtggatgctttggaggagcgtctggattggcttggctggactaatggtgacggctacggtttggatggtgtgtattctgcgaatcggcttgctacggcgtcgtgtgatgtgcatttggatgcgctgatttttggtttgtcgtttgtggctgttattccccaagaggatgggtcggtgttggttcgtccgcagtcaccaaagaattgcaccggaaagttttcggctgacgggtcgcgtcttgatgctggcctggtggtgcagcagacgtgtgatcctgaggttgttgaggcggagcttttgcttcctgatgtgattgttcaggttgagcggcgggggtctcgtgagtgggtcgaggtgggccgtataccgaatgtgttgggtgcggttcctttggtgccgattgtgaatcggcgcaggacgtctcgtattgatgggcgctccgagattacgaggtctattcgtgcttacacggatgaagcggttcgcacgctgcttgggcagtctgtgaatcgtgatttctatgcttacccgcagcgctgggttacgggtgtttctgcggacgagttttctcagcctggctgggtgttgtctatggcttctgtgtgggctgtggataaggacgatgacggtgatactccgaatgttgggtcgtttcctgttaatagtcctaccccttattctgatcagatgcggctattagcccagttgactgctggggaggctgcggtgcctgagcgctatttcgggtttatcacgtctaacccgccgtcgggtgaggcgcttgcggcggaggagtctcgactggttaagcgtgctgagcggcgtcaaacatcgtttggtcagggctggctgtcggttggttttctggctgcgaaggcgttggattctcgcgtggatgaggctgcttttttcggtgatgtgggtttgaggtggcgtgacgcgtcaaccccgactcgggcggctacggcggatgctgtgacgaagcttgtgggtgccggtattttgcctgctgattctcggacggtgttggagatgttgggtttggatgatgtgcaggttgaggctgtgatgcggcatcgcgccgaatctgcggatccgttggctgcgttggctggggctatttctcgtcaaactggcgaggtttgatggatggcttcgggtgtgatgtcgaggctggcggcgactgagtatcagcgtgaggcggtccggtttgccgggaagtatgcgggctattatgccgagcttggtcgtttgtggcattccggaaaaatgagtgacacgcagtatgtgcgtttgtgtgtcgagttggagcgtgccggccatgatggttcggcgtcgttggcggcaaggtttgtgtcggattttcgccggttgaatggtgtggatcctggtttgattgtgtatgacgagtttgatgctgctgctgcgttggcccggtcgattgcgaccacgaagattttgaagggtgatccggatagggcgaatgatactattgatgcgatggcggcgggttttgatcgggctgtgttgaatgctggccgtgacacggttgagtggtcggcgggtgcgcagggccggtcgtggcgtcgtgtcacggatggtgatccgtgtgctttttgtgcgatgcttgcaaccaggtcggattatacgactcgggagcgtgcgctaaccgtggggcatactcggcgtcataggcggggtggtaagcgtccgctgggttcgaagtatcatgatcattgtgggtgtacggtggttgaggttgttgggcgttgggagcccagttccgcggacaccgcatatcagcgggtttatgagaaggctcgtgagtgggttgatgatcatgggttgcagcagtcgcctggcaatattttgaaggctatgcgtactgttggcgatatgagatgattgatatggtttccggttgtgcgccgccggttatcggtgcacgtggttgtctcccgcacggggggcggcaagattgtgttgttttccgcaaggagtgtagggttaggctatggccgatcagaatgttgaagaacaaaacgtcgacaaagtagaagaggttcccgaaaagggtgacgttgttgacgtcgtaaaggatgatcaaagcgggcagacaggcgatcagtcgaagcatgatggtggagataagccgtctgggactgattggaaggctgaggctcgtaagtgggagtctcgtgctaaaagtaatttcgccgagttggagaagcttcgcgcctcggatggtgatgcggggtctactattgatgagcttcgccgtaagaatgaggagctcgaagaccagattaatgggtttgttcttgagggtgtgaagcgcgaggtggctgccgagtgtggcctttcggccgatgcggtagcttttctgtctggcggtgatcgcgagtcgcttgccgagtctgctaaagcccttaaggggctgattgaccatagtggtagtggtggcgcgggtgtgcgccgtcttgcggggagtgcccccgtggatgatgttaaacgacgtgagggtgtcgcgtttgtggatgctcttgtcaataattctaggagatgatttatcatggctgacgattttctttctgcagggaagcttgagcttcctggttctatgattggtgcggtgcgtgaccgtgctatcgattctggtgttttggcgaagctttcgccggagcagccgactattttcggacctgtgaagggtgccgtgttttcgggtgttcctcgcgccaagattgttggtgagggcgaggttaagccttccgctagcgttgatgtttccgcgtttactgcgcagcctatcaaggttgtgactcagcagcgtgtctcggacgagtttatgtgggctgacgccgattaccgtctgggtgtgcttcaggatctgatttcgcctgctctgggtgcttctattggtcgcgctgtggatcttattgctttccatggtgttgatccggctacaggtaagccggctgctgctgttaaggtgtcgctggataagacgtcgaagacggttgatgccacggattctgccacgaccgatctggtcaaagcggtagggctgattgcgggtgctggtttgcaggttcctaacggtgtcgccctggatccggcgttctcgtttgcgctgtctaccgaggtgtacccgaaggggtctccgcttgccggtcagccgatgtatcctgccgccggtttcgctgggcttgataattggcgtggacttaatgttggtgcttcttcgactgtttcgggtgccccggagatgtcgcctgcctcgggtgttaaggctattgttggtgatttctctcgtgttcattgggggttccagcgtaacttcccgatcgagctgatcgagtatggcgatccggatcagactgggcgtgatcttaagggccataatgaggttatggttcgtgctgaggctgtgctgtatgtggctatcgagtctctggattcgtttgctgttgtgaaggagaaggctgcaccgaagcctaatcctccggccggtaactgatttattgtagcggtgatatgtatatgtgcagggggtggtgttgatgggtatcattttgaggcctgaggatattgagcctttcgccgatattcctaaagataagcttgaggcgatgatcgctgatgtggaggctgttgctgtcagtgtcgccccctgtatcgctaaaccggacttcaaatacaaggatgctgccaaggctattctgcgtcgtgctttgttgcgctggaatgatactggcgtgtcggggcaggtgcagtacgagtctgcgggaccgtttgcccagactacacggtctaatacgcctacgaatttgttgtggccttctgagattgctgcgttgaagaagctgtgtgagggtgacggtggggctggtaaagcgttcacgatcacacccacgatccgtggcggatatgcacattctgaggtgtgttctactgtgtggggtgagggctgttcgtgcgggtcgaatattaacggctacgctggccctttgtgggagatatgatatgattaattttccttacggtgaaacggttgtgatgcttcagccgactgttcgtgtcgatgatcttggcgacagggttgaggattggggccatcctgtagaaaccgtgtaccataatgtggccatctatgcttctgtgtcacaggaggatgaggctgccggccgtgacactgattgggagcattggtcgatgctgttcaagcagcctgtcaagggtgccgattatcggtgtcgttggcgtattcggggtgttgtgtgggaggctgacgggtctcctatggtgtggcatcacccaatgtctggctgggatgctggtacgcaggttaatgtgaagcgtaaaaagggctgatggttgtggcacgtgatgtgaatgtgaagcttaacttgccgggtattcgtgaggtgttgaagtcttctggggtgcagggcatgttggctgagcgtggcgagagggtcaagcatgcggcctctgctaatgtgggtggtaatgcttttgataaggcccagtatcgtgccgggttgtcgtctgaggtgcaggttcaccgtgttgaggctgtggctaggattggcaccacctataagggtggtaagcgtattgaggcgaagcatggcacgttggctaggtcgattggggctgcgtcgtgatcgtttacggtgatcctcgtgtgtgggctaaacgtgtgctcaaggatgatggctggctgtctgatataccgtgcacgggtactgtgccggatcaatttgagggtgacctgatttggcttgcgttggatggtggcccccagttgcatgttcgtgagcgtgtttttcttcgcgtgaatgtgttttcggatattccggatcgtgctatgtcgttggcgcgtcgtgttgaggctgtgctggctgatggtgttgatggtgatccggtggtgttttgtaggcgttctactggtcctgatttgttggttgatggtgcacgttttgatgtgtattcgctgtttgagctggtgtgccgtcctgtcgaatccgagtaaacgtatttgttttctatattttgtttttgtttgattatttttgggggttgtgatggctgctacacgtaaagcgtctaatgttcgctctgctgttaccggtgacgtctatattggtgccgctcacgccggtgacactattgatggtgttgggaagattcctgacggtcttaccgctttagggtacctgtcggatgacgggtttaagattaagcctgagcgtaaaacggatgatttgaaggcttggcagaatgcggatgttgttcgcaccgtggctacagagtcgtctatcgagatttctttccagctgatcgagtccaagaaggaggttatcgaactgttttggcagtcgaaggttactgccggagtcgattcgggttcgttcgatatttctcctggtgctacgaccggtgttcatgccctgttgatggatattgttgatggcgatcaggttatccgctactatttccctgaagctgagcttgtcgatcgtgacgagatcaagggtaagaatggcgaggtgtatgggtatggtgtcacactgaaggcgtatcctgcccagattaataagaagggtgatgcggtgtctggtcgggggtggatgacggctttaaaagctgatactcctccggttcctccgaagcctccgaagcctgagccggatcctaatccgccagccgagaactgatacatatttttgagggattgttgatagatgagtgacacaggtttcacgttgaagattggtgaccgtagttgggtgttggctgatgcagaggagacggcgcaggctgttcctgcccgtgtttttcgccgtgccgctaagattgcccagtcgggggagtctgctgatttcgcccaggttgaggtgatgttttctatgttggaggctgccgccccagcggatgctgtagaagcgcttgagggcttgcctatggtgcgtgttgccgagattttccgtgagtggatggaatacaagcctgacggtaagggtgcctctttgggggaatagtttggctccacggcctgattgatgattatcgtggggccatcgaatatgattggaggacccggttcggttgctctgtttatgatgttggtggcccggtgatgtgttggggtgaggctgtccggctggctggcgtgttgtgtactgatacgtcgagccagttggcagcccatctgaatggttggcagcgcccgtttgaatggtcggagtgggcggtgttggatatgttggatcattacaggtctgctaatagtgaggggcagccggagcctgtggcgaggccgacggatgagcgtcgggctaggtttacgtcgtctcaggtggacgatattttggcgcgtgttcgtgccggtggcggggtgtctcgcgagattaatattatggggtgaatagtgtatgtctggtgagattgcttccgcctatgtgtcgttgtatacgaagatgcccggtttgaaggctgatgttggtaaacagttgtcgggtgtgatgcctgctgagggtcagcgttcgggtagtctttttgcttccggtatgaagttggctttgggtggcgcggcgatgatgggtgccatcaatgttgccaagaagggcctgaaatcgatttatgatgtgactattggtggcggtattgctagggcgatggctatcgatgaggctcaggctaaactgactggtttgggtcacacgtcttctgacacgtcttcgattatgaattcggctattgaagctgttactggtacgtcgtatgcgctgggtgatgcggcttctactgcggctgctttgtctgcttctggtgtgaagtctggcgggcagatgactgacgtgttgaagactgtcgccgatgtgtcttatatttctggcaagtcgtttcaggatacgggcgctattttcacgtcggttatggctcgcggcaagctgcagggcgatgacatgttgcagcttactatggctggtgttccggtgttgtctttgcttgcgaagcagacgggtaaaacgtcggctgaggtgtcgcagatggtgtcgaaggggcagattgattttgccacgtttgcggctgcgatgaagcttggcatgggtggtgctgctcaggcgtctggtcagacgtttgagggcgctatgaagaatgttaagggcgctttgggctatcttggtgctacggctatggccccgtttttgaatgggttgcggcagatttttgttgcgttgaatccggttatcaagtcggtcacggattctgtgaagcccctgtttgcgtcggtggatcaggggattcagcgggtgatgccgtctattttggcgtggattaatcgtatgccgggcatgattacgagaatgaatgcacagatgcgcgccaaggtggagcagttgaagggcatttttgcgagaatgcatttgcctgtccctaaggtgaatttgggtgccatgtttgctggcggcaccgcagtgtttggtattgtggctgccggtgtggggaagcttgttgcggggtttgccccgttggcggtgtcgttgaagaatttgttgccgtcgtttggtgctttgaagggtgccgctggcgggcttggcggcgtgttccgtgccctgggtggccctgtcgggattgtgatcggcttgtttgctgccatgtttgcgacgaatgtccagttccgtgcctctgtgatgcagcttgtgggtgttgtcggtcaggcgttggggcagattatggctgctgtgcagccgctgtttggtttggttgcgggtgttgtggcccagttggcgccagtgtttggccagattattggtttggtggctggtttggctgcccagctggtgcctttgattagtatgcttgtcgcccggctagttcctgtgatcacgcagattattggtgcggtgacacaggttgcggccatgctgctgccagcactgatgccggtgttgcaggctgttatggctgtgatacggcaggttgttggcgtgatcatgcagcttgtgccggttttgatgcctgtgattcaacagattttgggtgctgtgatgtctgttctgccgcctattattggtttgatacggtcgctgataccagtcatcatgtcgattatgcgtgtagtgatgcaggttgttggtgccgtgttacaggtggtggcccgtattattccggttgtggctccggttgttggggctgtgatagggtttgttgcacgtattcttggcgctattgtgtctgccgcagcccgcattattggcgctgtaacccgtgttatcggatgggttgtgagccatctggtgtctggtgtggcgcgtatgggtacggccatcctgaatggctggaatcatattagggctttcacgtctgcgtttattaacggtttcaagtcgatcatttcgggcggcgtgaatgctgttgtggggttttttgcccggcttggttcttcggtggctagccatgttcggtctgggtttaacgcggcccgtggtgctgtttcttccgcaatgaatgctatccgtagtgtggtgtcttcggtggcgtctgctgttggcgggttcttcgggtcgatggcgtctagggttcgtagtggtgctgcgaggggctttaatggggccaggagtgcggcttctagcgctatgcacgctatgggttctgcagtgtctagcggtgtgcatagtgtgttggggttttttcggaatctgcccggtaatattaggcgtgctctcggtaatatgggatccttgttggtgtcggctggccgtgacgtggtttctggtttaggtaatggtatcaagaatgctttgagtggcctgctggatacggtgcgtaacatgggttctcaggtggctaacgcggctaaatcggtgttgggtattcattccccgtctagggtgtttcgtgatcaggttggccgccaggttgttgccggtttggctgaggggatcaccgggaatgctggtttggcgttggatgcgatgtcgggtgtggctggccgtcttccggatgctgtggatgcccggtttggtgtgcgatcgtctgtgggctcgtttacaccgtatggcaggtatcagcgtgcgagcgagaagagtgttgtggtgaatgttaacggcccgacgtatggtgatcctaatgagtttgcgaagcggattgagcggcaacagcgtgacgcgttgaacgcgttggcttacgtgtgagtgggggtgttgtgcatgtttattcctaacccgtctgatcgtgccggtttgactgttacctggtctatgttgccgttgattggtaatgatccggagcgtgtgcttcatttgacggattatacgggtgcgtctcctgtcatgttgttgaatgattcgttgcgtggtttgggtgttcctgaggtggagcatttttctcaaactcatgttggggtgcacgggtctgagtggcgcgggtttaatgtgaagcctcgcgaggtgacgttgcctgttttggtttcgggtgttgacccggatcctgcgggcgggtttcgtgacggttttttgaaagcctatgacgagttgtggtctgcgtttcccccgggcgaggtgggggagttgtctgtgaagactcctgccggtgttgagcgtgtgctaaggtgtcggtttgattcggtggatgacacgtttacggttgatccggtgaatcgtggctatgcccgctatgtgcttcatttgatagcctatgacccgttttggtatggggatgagcaaaagtttcgtttcagtaacgcgaagttgcaggattggttgggtggcggccctgtaggcaaaaacgggactgcgtttccggtggtgttgacgcctggtgttggttcgggttgggataacctgtctaataagggtgatgtgcctgcgtggcctgtgattcgtgttgaggggcctttggattcgtggtctgtgcagattgatggtttgcgtgtgtcatcagactatccggttgaggagtttgattggatcacgattgatacggatcctcgcaaacagtctgcattgttgaacgggtttgaggatgtgatggatcgtttgaaggagtgggagtttgctcctatcccgccaggcggttctaagagtgtgaatattgagatggttggtttgggtgccattgttgtgtcggtgcagtacaggtttttgagggcttggtgaatagttgatggctggtcttgtcccgcagataacattgtttacgccagactatcgtcgtgtggcgcctatcaatttttttgagtcgctaaagttgtcgttgaagtggaatggtttgtcgacgctggagttggtggtgtcgggggatcattccaggcttgacgcgttgacgaagccgggtgcacgccttgttgtcgattatggtggtggccagattttttctgggcctgtgcgtaaagtgcatggtgtgggtccttggcggtcttcgagggtgactatcacgtgtgaggatgatattcggctgttgtggcgtatgttgatgtggcctgtgaattatcgtcccggtttggtgggttcggagtggcgtgccgaccgtggttatgcccactattcgggtgcggcggagtcggttgctaagcaggtgttgggggataatgcgtggcgttttccgccaggtttatttatgaccgatgatgagcgtcgtggccgctatattaaggattttcaggtgcggtttcacgtgtttgccgataaattgttgccggtgttgtcgggggctcggatgactgtttcggtgaatcagtttgaggataaggtgaatgatcagcggggtttagtgtttgattgtgtgcccgcggtgacgcgtagccatgtgttgactgccgagtcgggttcgattgtgtcgtgggagtatgtgcgtgacgcccctaaggctacgtcggtggttgttggtggccgcggcgagggcaaggatcggctgttttgtgaggatgttgattcgatggctgagggggattggtttgatcgtgtcgaggtgtttaaggatgcccgtaacacggattctgagaaggtgtctctcttcgatgaggctgagcgggtgttgttcgagttaggggccacgtcggggtttaagatcgagttggccgagtcggatgtgttgcgttttgggcccggcaagctgatgcccggggatttgatttatgtggatgtgggttctggccctattgcggagattgttcggcagattgatgtggagtgtgattcgcctggtgacggctggacgaaggtgactcctgttgcgggggattatgaggataatccgtctgccctgttggctcgccgtgtggctggtttggctgcaggtgtgcgggatttgcaaaagttttaaaagtgatgggggtttgttgtgggtattgtgtgtaaagggtttgatggtgtgttgaccgagtatgattgggctcaaatgtctggtctgatgggtaatatgccgtcggttaaggggcctgacgattttcgtgtcggcactacggttcagggtgccacggtgttgtgtgaggttttgccggggcaggcttgggctcacggggtgatgtgcacgtcgaatagtgtggagacggtgacggggcagctgcctggtcctggtgagactcgctacgattatgtggtgttgtctcgggattggcaggagaatacggccaagttggagattgttcctgggggtcgtgcggagcgtgcccgtgacgtgttgcgtgccgagcctggcgtgtttcatcagcagttgttggctactttggtggtgtcgtctaacgggttgcagcagcagttggataggcgtgccgtggcggctagggtggcgtttggggagtctgcagcctgtgatccgacacccatggagggggatcgtgtgatggttccttcgggggccgtgtgggctaatcatgctaacgagtggatgttgttgtcttccagtattgagacgggttcgaagtcgatcatgtttggcgggtctgctgtgtatgcttacacgatcccgtttgatcgccagttcagtagtccgcctgttgtggtggcgtctatggctacggcggctgggggtacgcagcagattgatgtgaaagcctacaatataactagcaagaattttggtttggcgtttatcacgaatgatgggtctaagccgaatggtgtgcccgctgttgcgaattggatagctgtgggcgtgtgaccgtgttgaggctgtggtggcggttggtgtgatgttggggggctgtggtgtcgtggtttactcctgcactggtggcctctatttgtaccgcgttggctactgttttgggttcggttcaggctgtcacatctaagtctaggaagcgtttgaggcgcctgtctgctcaggtggatgcgatggaagagtatacgtggggtgtgcggcgtgaggttcgccggtttaacgctggtcttcccgataatgtggatcctttggtgttgcctgatccgcccgggtttttgcaggatcagttggggggtgaatagatgagggagttggaggaggagaagcggcagcgccgtacttttgagaaggcttctatggtgttgttgtttctgtcgcttgtgctgttggcggtggttgctgggggtgctttgcgtttcggctctgtggtttcgcagagggattcggagcaggcgcgtgcggagtcgaatggtactgcggctaaagggttggctgcccgtgtgaagcaggtgtgcgcccagggtaggcaggagtcggtgcgtcttcaccggtctggcctgtgtgtggatgctgcccgtacggagcggagtgttcagggtgttcctggcccggctggtgagcgtggcccgcaaggccctgccggtgtggatggccgtgatggcagtaatggttcggctggtctggttggcccggttggcccgcagggttctcctggtttgaatggtgtgaaggggcctgacgggttgcccggtgctgacggcaaggatggccatggtggtgttccgggccgtgcaggtgatgacggtgtgaacggtgctgatggtcgggatggttcggccggtgaacgcggtgatgtgggcccttcaggttccgccggtccacagggtgaacggggtgagcgcggcccgcaaggccctgccggtgtcaacggatccgatggtaaagacggtaaggatgggcgtgatggccgctcggtggtgtctgtgtactgctcggagggccgcctgtttgtgaaatatagtgacggtgcgtcttctacagtgtcagggtctagggcgtgcccgggtgtggccccgtcgccgattgtgaccgtgtcatcccacaaatagtaagaggaagggtgttactagtgttgatgatgttttggggtggtgtgcggtgagatacattccagcggcacaccattcggctggttctaattctccggtgaatagggttgtgattcatgcgacgtgcccggatgtggggtttccgtccgcctcgcgtaagggtcgggcggtgtcgacggcgaactatttcgcgtccccatcgtctggtggctctgcccattatgtgtgtgatattggggagacggtgcagtgcctgtccgagtctactattgggtggcatgccccgcctaatccgcattctttgggtatagagatttgcgcggatgggggttcgcatgcctcgttccgtgtgccggggcacgcgtatacgcgggagcagtggcttgacccccgggtgtggcctgcggtggagagggctgccgtgctgtgccggcagttgtgtgacaagtatggcgttccgaagaggaagctttctgtggcagatttgaaggccggtaaacgtggcgtgtgcgggcatgtggatgttacggatgcgtggcatcagtcggatcatgacgatccggggccgtggtttccgtgggacaaatttatggccgtagtctgcggcaaagatgatggaggggagttaactgtggctgatgtgaaagccttgcatgatcagattaaacaattgtctgctcagcttactggttcggtaaacaggctgcaccacgatgttggtgtagtacaggtacagaatggtgacttgggtaaacgggtggatgccctgtcgtgggtgaagaacccggttacggggaagctgtggcgcacgaaggatgctttgtggagtgtctggtattacgtgttggagtgtcgcagccgcattagcaggcttgagtctgatatcaatagtttaaagaagtgatgtgtggtgggtaaacagttttggttgggcctgttagagcgcgccctgaaaacttttattcaaacgtttgttgctgtgcttggggtgactgcgggtgtcacctataccgcggagtcgtttcgtgggcttccgtgggaatcggcgttgatcacagccacggtggctgctgtgctgtctatagctacctcgtttggtagcccgtcgtttgtggccggtaaacccaaggttgctccgcctgttgatgctgggcttgttccacccgacgatgtgggcctggtagaaccgcatgcggtggatgtgacggatcctggcatgatcgagccgatggatgatgagaatgtgggctatgtgccgaggcgtgcatccgagtctgaggttggcacggtagagccgtcagaatcataagtgaatatagtgtgtgccccagcggtgctgccacgtgtgtggtggctgctgctggggcactatttttgtgtctactgtatggctatgattcgttgttgtcgatggtggcttcgagcatctggtgcaggtgttcacactcggatatggtgtcacgggcttgatctaaaatgtctcgccggatcacgtttttgtggttgttgctgaggctgataagcgaacacatgatatcgtcggcggcggattgtagtagtttggcctggtatgcgattccggcgagccagtctatggcttccgggcttgcctgtgtgttgtctggcatgccactggtgttgctgttgtttgtggggtatcctgcactgtcgcagtcccacaggatttcgctgcactcgtctagcgtgtcttgatcgatgttgaggttgtcgaggctgacttctttgatggtgagatttacatcatctaaagagatgtggacgtggtattcgtcttgaatgtcggccacaatgttttccagctggttcatgttggtgggctgttgttggatgattcggtgtaccgctgttttgagggcagcgtgggggatattggttgtgttgttcatggttttatttcatccctgtactatcgtcgtctatgtatgatgttgtgttggcgtatttggtgagtgtgatcagtgtttggtctgcccactgtttcaccgtctgcctagtcacacccaatcgctgggctgccaccgaataggtttgatcatacccgtatacttccctgaatgcagccagccgtgccagccgtttcctctgtttggatggttcacaggtgagggtgtagtcgtcgatggctagctgtaggtcgatcatggtaacaatgttgttgccgtggtgttgtggagcggttggcgggggtggcatacctggctctactgatggtttccatggtccgccgttccagatccattgggcggcttgaatgatgtcggctgtggtgtaggtttggttcatgtgtcacccccggaacaggttgtcgaggttgtctaggttggggctggtgtttgtggtgtcgaatcgtcctacgcagtggcagtagtcgtacatgagtttaataatgtgttgatggtcaccaaggtaggtgttgccgctgatgctgtaggtggctgtgccgtctttgctgatggtgtatttggcggtgatagtttcgggtgtttcggtgttggtgatgatggcggtggtggtggtgcctactgtttggagtacggtggtttgggttccgtcgtcgagggttgtagtaaccataatgggggttctccttttagttgctggtttgattgtcggctatagtggtgatttcttgcaccggtttggggagatccaaatgctgtatggttttgttggctagccgtttggctaccctgtagcacattttggtgtagtgtttgttgtctaggttgtggtattgttctcgcaccgcaatatatagtagggagtcttggtacaggtcgtctgcgctgattgcggggtagtgttcggctattttggcgcatgcccggttgagtgtgcgtagatgatggtctgtggcccatccccacgatgctgtggtggccaggtctgcttttgttggtcgtctactcatgacactatttcatctcgctatctggtagttgtttggtgttttgttgttgatagtgtagcacacgagtccggggttgccggtggtgcctgtgcggtgccggtaccagacggattctccttccatggatgggcattgaataaaggtgcgttgtccttgctcggagatttctaggtggtgccggtgtcctgccatgaggatgtgggatgtggtgccgttgtggaattcttggcctcgccaccattcgtagtgttggttgttgcgccattggtggccgtgggcgtgaaggattttggtgcctgccacatcgacggtagtggtcatttcgtcccggctagggaagtggaagtgaaggttgggatattggttgttgagctggtaggcttctgcgatggcccggcagcagtccacgtcgaaggagtcatcgtaggtggtgacgcctttaccgaatcgtacggcttccccatggttgcctgggatggatgtgacggtgacgttggggcagtggtcgaacatgtggatgagttgcatcatggccatgcgggtgagcctgatttgttccgtcaagggtgtttgtgtgcgccaggcgttgttgcctccttgtgacacgtatccttcgatcatgtcgccgaggaaggcgatgtggacccggccgggtttgcctgcctgttgccagtagtgtttggcggctgtgagggatcgaagatagtcgtctgcgaagtgtgctgtttcaccctgagggatgcctttgccgatttggaagtcgcctgcccctaccacaaacgcacaatcactgttgttgctggtggtgtcggctggtttggggggctgccagtcggctagcttgtcgacgagttcatccacgggatacgggtctgttgcgggttggtggtcgatgattttttgtatggatcggcctgtttctccgttggggagtgtccattcggagatgcgtgtgcggcgtacggttccattggctagatcgtcgcagatggtgtctgcttcgtcattgtgctgggctagctgtgtgaggagccggtctatattgtctatcactggttttcctcctctttctgggtgttggtttgttggcggcgatagtctttgataacggtggcggagatggggtatcctgcctgggtgagctgtttcgctagccacgaggctgggatggttttgtctgcgagcacgtcggctgcttttgccccgtagcgttgaataagggtttcagttttggttgccatgatatcctatcggttgtgtggcgggctgccatcctgtgcggcagtcgccgtcgtgtcctggtttgcgtgtgcaccaggatatggttccgtctgtgtggttgagtgttttgccgcacatgacgttttgtagatgctctggcagtgcgccgtcaccctggttgctggtttgtgtgtcgaagagtgttttctggttagtgaaatgctcggatacggtcccgttgtggacgggtagtatccatgttttccattgctgctgtagcctggtgttccagtggaattgtttggccgcgttttctgcctgttttaaggttttgtagtagccaacgagtatgcgctggtgttgctggtcgggagggtttgggcctcgccagtattgtgcggccacggcgtagcggttgctggctgtgaaggtgttccagcagtattcgataatgttgttgagtgtgtcgtctgtgaagtcgtctgggttgtgttctgttgcctgggtgataatgccgcggatggcttgccggtttttggtggcgggtttgaacgagatgctcacgatagtaccggcttgtcgtcttgcatgaactggttgaaggtgttgttcccggcgtgttgggcttgtgtgatgtcctggtcggtccagtcggggtgttgctgtttcagatagtaccagtggcacgcattgtaggtttcgtcttgtagccgtgtgagatggttttcggtgatgatttgtttccacattgtccatgacacgtcgagccggttgaggatttcgagggctgggatgttgaattggttgaggaagaggatttcgtaggtgtagtagtttttctcgtattggtcccatccgcttcggtgcctgttgggctggtttttggggtaggcttcccggcatactttgtgtaaacgtttggccatgtcgtcgggtagtttaatgtcggggttggcgcggatcatggatcgcatcccatcataggtggtgccccaggtgtgcatgatgtaggtggggtcttcaccatcggcccatttttctgcacagatggcgaggcggatgcgcctcctggctgcttggctggtgttgcgccggttggtgatggggcacgtgtcgaggggatccatgatattttagtgtacctttcttggtttgggttgcttgtgtggttttattgtagcactgtgttgagggcttgtgtcaaccctgttttgccggttttcaggtaggtgtctgtgacatccccgagggtgaggggcacatgggtggcttggggaagtgctgtctggagagtttgggccatcttatctcccgcggggtcggggtcggaccagatgtaaacatggtcgtagccttcgaagaatttggtccaaaagttttgccacgaggttgcgccgggtatggcgacggcgggccatccgcattgttcgagtatcatggagtcgaattcgccttcacaaatgtgcatttctgctgccgggttggccatggcggccatgttgtagatggagcctgtatccccggccggggttaagtatttggggtggttgtgggttttgcagtcgtgttgtagtgagcagcggaaacgcatttttcttatttcggctggccgcccccaaacggggtacatgtaggggatggtgatgcactggttgtagtcttcgtggccggggatggggtcattgtcgatgtatccaaggtggtggtagcgggctgtttcttcgctgatgcctcttgccgagagaaggtcgagtatgttttcgaggtgggtttcgtagagggccgaggctttctggattcggcggcgttccgcaatgttgtatgggtgtagtgagtcgtacattcgggttttcttcttccaatcgttgttgtagcttggcgaggccgcctccaacaccgcatgtgtggcagtaccagacgcccttgtcgaggttgatgctcatggagggctggtggtcatcgtggagtgggcagaggatgtgttgctcgtttttggacgggttatagcggatgcgataggtgtcgaggaggcggcgggtgtcagaggtgtgggaggagctcgttgagggttgataccacataggcttcgctccatggcttgtttcgctgtttcatgatgactagtccgatggtggattggttttttttgttgcggtgggtttcatagttgcgtgcctcgattgtggcttctttcacgaattgggcgagatgctgctggccagccttggcttcgatcacataggttttgttgccggttttgaggatgaggtcgccttcgtcctctttgccgttgaggtggaggcgttctatatcgtagccggtgttgcgtagctggtgtaggagtctggtttcccactcggcaccggcccggcggttgcgtgactgttgtgaaaccatcatagtcctttatgttcttgtgtcatgttccatggctgtttttctaccaatggcccgaagaatgtgtattcggggtaggccctgagtctttcgtatcgggtgccgtctgggctagatttgccggtgcgctgtttcaacacagcaatgcgtgcctcggctggtatcgatagcccgttgccgttatcctcgccaccatacaatgagactccgaggatgagttgtggtttttcggagaggccgtttttgatctctcgtctggctggcgggtgttcgaggtcggtgccggttttgtcggtggcgtggtgtgtgacgatgatggtggagccagtatcccgacccaatgctgtgatccattgcatggcttcttgttgggcttggtagtcactctcgcagtcttggatgtccatcaggttgtcgatgacaataaggggtgggaaggtgttccacatttccatgtaggcttgtagttccatggtgatgtctgtccaggtgatgggtgactggaatgagaatgtgatgtgttggccgtggtggatgctgtctcgatagtattctggcccgtagtcgtcgatgttttgttgtatctgggtggtggtgtgttgggtgttgagtgagatgattcgtgtggaggcctcccagggtgtcatgtcacctgaaatatatagtgctggctggttgagcatggcggtgatgaacatggctagcccggatttttggctgccggaccgccccgcaatcatcaccaaatcccctttgtggatgtgcatgtccaggctgcggtagaggggttctagttgtggtatgcggggcagctcggctgctgtttgggaggctctctcgaaggatcgttgtagagagagcatcgggaccttatctatctatcggtggttgtgggtggtcagatggagtcgatatcgatatcagcctctgctgatgctgaagtgtcatctagctggccattatcgcgcttgtctacgtattcggcaaccttatcatagatggcgtcatcaaggggtttgagcacaaccgcgttgaacccgtttttggtgcgcacggtggcgagtttgaaggcctgctcctcgccaaggtatgcctctagatcgcggatcatggagtgtgggcggtcgttattgccgcgcgctttctcaataatagcgttggggatggtttctggggtgccgttgttgagatcgtctagggtgtggaagatggtgacgtcggcgtagatgcggtctgcgacctgtccgccgtagccttcagtgttgtgttcgacgtcgtggactttgaaggcgatggcggtggcatcctggtttttggacgggttgaagaaggtgctgctgttgttgtttcggtagttggcgagtcccataactgtatcctttactgtttgtgttgttttgttggtttgtgtcggtttttatcgggtgaggctgtttcgtttattcctgaaagcctctgacacgtccgggttgctggtgattgtctttttgtactgtttgaggaggtcggctagctgtgccttgcttgttgctttgttgattttgtcaataacgatggtgttttcttgggatgcgatgttgtctacatagtttttggctgcctggtcgtatcggtcttggagaatgatggaggcgctcgcgatcagtgttgccaaatcccagtctttagagacgtcgtcgtttttgagtcctcccagtaaatcaatgatggattgtttgatgtcttctgtggtgtctcctctgatgactgcccacggggcggcatagtctccaccgtatttgagtgtgatagtgatacgatcatccgtactgttggtgtcggtcactggttctccttatctttctcgagtggtgtgatggtggttttgatcgggtacctgtaggcgtccttgccgtctaccgcccagcaggcgtctcgtacggggcatcctttacacagggctgtgacgtgggggacgaagatgccttggcttattcctttcattgcttgactgtacatgcatgatacatgccggtaggtgttgttgtcaagatcgtacagttcggttgatgtgccctgctcgaccgattgctcgtatcccttggtggtggcgggtgtccaaaacatgcctttcgtcacctggatgccgtgttgggcgagcatgtaccggtaggtgtgcaactgcatagcatcgactgggatgcgcccggttttcaggtcgaggataaacgtttcgccggtgttggtgtcggtgaagatgcggtcgatatagccgacaatctgtgtgccgtcggcgagggtggtttcgactgggtattcgatgcctggctggccgtcaatggttgcggtgatgtattctgggtggtttcgcctccatgttttccaccggtcgacgaagatggggccatagtgtatccaccaatcatagtttttcttgttgggcccgcctgactcgcacatgtttttgcacaccctgccggagggtttaatctgggtgccctcttctttgaccagggcgatttgggtgtcgaacacattgttgaaggatgagagtttgtcgggcagtgcagggtattcgacggggttatacaggtggaggtcatgctgttcggttatgtggtgtatagcactgccggcgatggttgcataccaggtgtggtgttgggcatggtagccgtgggatagtcgccatttttcaccgcattcggcccactgtgtgagtgaactgtaggagatgtggcctggatgctggatggttttcggatattgtgctagaggcatgttagttgtttttgttccatgggttgcgggtgtcttggccggcctggtgttgctggtatgcgaggagtgtcaggcagtgccaggctgcatgggccagatgcggcagatgtgattcatagtcgaggttgtttccttgctgccaggctagtagatgtctgtagagggcgtcgatactgtgacaccaggggtatcctccggtccagttgttgtcgccgtatttggtggcgccgtatccggctacttcgccgagcgagtggagggatgcggggtcgatgagggagagcctgcatagtttcagttcttttttggcgccggtgttggggtcggtgtacatgcgggtgggctcatccatgagatgtgtgcgcctttcttgagtgggttactggttgttgtcgtgggctagggctacggcgagaatgatgatggcgagggtttcagcgatgatgatgggtgttgtgatcatttggtgtcgcggggatggtaggtgagggttgatgcgcctaggagggtggcgagggcgcaggctgcgatgattgcgagggctgctttgtggctagtgcctgttgcgtacatccatgtgatgatgccgccttggatccatgcgaggctggtgaagaatgtttcgtaactgtgcagctcaatgttgttgttgcgtgtgttcatgcttgttcctgaatgatggtgttgatggttttgtaaatgttgtacaggtctgtttcgatggtttttagctggctgatttggtggtcgaggttgatgttcgggttgagggtgttgatgcgggatgcgatgtcggtggctgtgcgtagtgtgccgccggtgtggtgaatgatgtgtgccgtgtcggcgaggccggtggtgacggcgtagtgggagaggagaggcatgataggtgtgctttctttctggtcagcgtgaagggttgatggacatgtcctcaacctgcggcttgtcttcggtaccggacacttggcagaaaaccttcacttgtgccttggatgccccgggttgctttgcggtggcaccgtaggcgatggagaaggtgtctttgtgggcgccgatgactttgtgtaggaagaggtcgatgtcggggtttccgttccagttgacaccttgcgctgcagccatctgggtggctttctgattgcaggcgtgtgctgccgtaatcatagtgagcccggtggaggtttcttcaccgcgggcttgcgcctgccgatgagccttggcctgctcggcttgtagggagcggactgcttctgcctgcttggctgtcttctcagccttgcgctgctgtgcggttttgggggtccattcggtgttggctgtggtggcctgtggggctggctgtgatgcgagtggcgggttgtcgtcgggggctggtaggaaggaggctgcggcgatgatggcgagggtggctccggcgatggtgtagcctgttttcttgttcatgaccgtgttcccctctcgtggggtttgttcgttgctgacatgattaatcattccatgggtggcatcggctgtcaagctgcgctcatttgggttgagcgttccttgtgtggctaggtgttttatcgggcgaatagggttaacaggtggccaacattgatgcgtgtcacattccagtagagttgtgtcgcctctgcctgtgtgagtggtttccactggttgtggctgtatacggttccgtcggtggcgatgaacgtgtcggggcgcatcttgtggagttcggcttccacatgctgccggtaggcttcggcgaggccctcaaaatccatatggtcgcagtggaggttttcgaggcgtgtcaggtcgaagggtgtggggcagtcgtagctggcggggctgtagagctgggtgaagtggtcggcgatcttttgcacgattattcctttccggtgatggtgtgttggttgtttgatcgtgtggcttcggcgatgatggcgtccacgtcgattgtgtcgatgatgtagtagagttcctcggcctcgtcctcggtgagtggctgccagttgcgtggcccgtatatggcgccgtcgagggtgacggtccattgtgggcggatgagccggatggcttcttcgactttggcacggtatagacggcagatgatagacgtctgggtgttgcctatgttgtgccctgttaggtgtgcggggtggagtgggttgatttctgtcggcccgtagagggttgtgaaggatggtgtgatgagtgttccatccacggtgggtgctcctttctggattgtttgggttgttgtggtttttatggtgtgatggttgcaaccgtgagtcaaggctgcgctcattcagcttgagcgtttcatgaggggtgtggtgtatatcactgaagcctttattgctcctgtaagcgtcttaaatggtctgggggtaggattatgcaggactaaccctgctagtcgattctagggcccttctagggcgtctcaggggtatgtctgggtgatggtaggtgttgtagatcattcggacgctcgaggttgtcatacatgacgatggttggggtgttctatctgggcataggttccactccctgtagtgtgtgagatagaccacatttccctagcctagtgtccatcaccaacaccccgcagctgatctggcgtggagggtgtagcccagaaatgccgtttaaagcttctagggtacacctaggagcgccttgcagggtgggggctaggtatttatacccccagcacattctgatcgattctagacgcctataagagctcgatacgtgatcagatcaccagacgcagaccatcctcccccatcctgcttagctaagcctacactatgtggacagtgtaggatactgtaggggaagaaagacacggtacaagaaagaagggggaggatccgccttaaagtcttagcacttaaggttttagcgcttagcaccgagccccctcaagggctcggcatcagcaccaccaggctcagctcatcaggcacagcctgaaagaggtacacgccatcagggaaggcttgagagtacgaggagccctagcgacgagtactcgaaagcctgagggaacacccttagtactgatgggcctagcgtgttcggaaaagacacacgagtcaagtgtgacagtccatcaggggtgaaacccgttctggctaggggtttcagccctaaccacccttaaaggttacaagagtctaagaaaatttaagaaaactcttaggaagaaagttgtgttcatgtccacccaaaaacagccaaaatagccctcaaacccgctaatagagccaaaccttcatgtttgactcttccagacggcgtatgctaggctggacaggtagccagctggacgcaaggccagaaagtgctgacgcacttcccgacctcgcttaccatcagtctaccaaacacttaaagaccttaagggcttagcgctaagcagcttaacacttagcaccgagcccttgaggggctcggcatcagccctaaggtacttatagtaactttaaaaccttaagagcttagcctttaaggatctaagttactataaaagctttcagaacttagtacttaatactttaagtaaacataaaagcttttaagtcttaaagtaaatatataaccttaagacttaaacattaacacctaagttaagtataaaaccttaaaggcttagcacgtaaggatctaaacttaacatcagtgtttaagactttaaaacttaaaataaaccataaagacttaaagacttataagctttaaacacttaaagtaactataagactttaaagaccttaagtacttaaagttaaccatcagtcttaaactttaatcttataacctataagtcttaaagcttataagttataaaagtttttagaagagtaaaggggttaacttctttacttctcttctctctttggttctttctctcttctcttcttttcttcatcaggggagaagaggaaccttttgccatcagcgctgatgggttttcgccgtgtgtctcgtgtgctcctggtcgcacgctcccgtcgcacactccccacactcttacacccgtgtccctttcaggcttagcgtgttcggctgaaggcgtacggcgtgtcacgctaacacccttaacatcaggtgagacttaaagtgtatattatatgtagaagactttaaaacctttaagggtgtacacgtttaggctgtgtccaacactgctaggcgcgaagtgctaagccttaaagcgctaacacacacccacccccatttttcttccgtgtccttttctttttgacaccgctggggggcgatgtgatctttctcacacccgtgggggtaggagagaaaaacaaacaccccaccacgatcacaaccccccaccaaacgaacaaaacagcccccagaatcgactagtagggcacaggtggggtaaacctaccccggacacattccaggctgttacagagacaacgagaagcttacaagggctataggtgatgaggaggcgcgatggcacacaccaaccgcaccgcatcctccgcccaccgacgctggcgcgagcgactcatcacccaagcccgacaacaaggccaaaccgaatgcccactctgcggagcaaccatcacctgggacactcaccaactaccaaccagccccgaagccgaccacatcacacccgtcagccggggaggactcaacaccctcgacaacgggcaaatcatctgcagaacatgcaacagaagcaaaggcaatcgcagcgaaccaaacatcagtttccaacaacaaaccacaaaaacccttgtcacctggtgaaaaaccagccaacccccgacggggaccaccccctgcacacccgtgcaagacc

SEQ ID NO: 41 - DNA, 29467 bp, Bacteriophage of P. acnes
agtgaaatacctcccctttgttgttttatcgttttgtcgactttttgtgttggtggtgagtgtggtgcagcctgagcttcctgatagtcgcgattggtgtgatgagactaggcgttggtgggatgtgtggggtgaggatcctcgtgcgcaatatgtgagcgatgaggagtggctgtttttgttggatgctgcggtgattcatgatgtggtgtggcgtgagggtcgtgctgatttggtggcttctttgcgtgctcatgtgaaggcgtttatggccatgttggatcggcattcggttgatgtggcgtctggtggccgtggtggcggttctgcggtggcgatgattgaccggtataggaagcgtaaaggggcctaatgtcgagcgttgttggttctcaggtgcctcgtcaccgggttgctgcggcgtattcggtgtctgctggcggtgatgctggggagttgggtcgtgcgtatgggttgacgcctgatccgtggcagcagcaggtgttggatgattggctggctgtcggtagtaatggcaggcttgcttcgggtgtgtgtggggtgtttgtgcctcgccagaatggcaagaatgcgatccttgaggttgtggagttgtttaaggcgactattcagggtcgccgtattttgcatacggctcacgagttgaagtcggctcgtaaggcgtttatgcggttgaggtcgttttttgagaatgagcggcagtttcctgacttgtatcgtatggtgaagtcgattcgggcgacgaatggtcaggaggctattgtttttcatcatccggattgtgccacgtttgagcgtaagtgtggttgtccgggttggggttcggtggagtttgtggcccgcagtcggggttctgctcgcgggtttacggttgatgatttggtgtgtgatgaggctcaggagttgtcggatgagcagttggaggctttgcttcctacggtgagcgctgccccgtctggtgatcctcaacagattttccttggtaccccgcctgggccgttggcggacggtagtgtggtgttgcgtcttcgtgggcaggctttgtcgggtggtaagaggtttgcgtggacggagttttcgattcctgacgagtctgatccggatgatgtgtcgcggcagtggcggaagcttgctggtgacactaatcctgcgctgggtaggcgtctgaattttgggacagtctcggatgagcatgagtcgatgtctgctgccgggtttgctcgggagcggcttggctggtgggatcgtggccagtctgctgcgtctgtgattccggcggataagtgggcacaatctgcggtggatgaggcggctctggttggtgggaaagtgtttggtgtctcgttttctcgttctggggatcgggttgctttggcgggtgccggccggactgatgctggggttcatgttgaggttattgatgggctgtcggggacgattgttgatggtgtgggccggttggctgactggttggcggttcgttggggtgatactgacaggatcatggttgccgggtctggtgcggtgttgttgcagaaggcgttgacggatcgtggtgttccgggccgtggcgtggtggttgccgatactggtgtgtatgtggaggcttgtcaggcgtttcttgagggtgttcgttcgggtgttgtgtctcatcctcgtgctgattctcgccgtgacatgttggatattgctgtgaggtcggctgtgcagaaacgtaaggggtctgcgtggggttggggttcctcgtttaaggatggttctgaggttcctttggaggctgtgtcgttggcgtttttgggggctaaacgtgttcgtcgtggccgtcgggagcgtagtggtaggaagcgggtgtctgtggtatgaactcggatgagttggctctgattgagggcatgtacgatggtatccaaaggttgtcttcgtggcattgtcgcattgagggctactatgagggctctaatcgggtgcgtgatttgggggtggctattccgccggagttgcagcgtgtgcaaacggtggtgtcgtggcctgggattgcggtggatgctttggaggagcgtctggattggcttggctggactaatggtgacggctacggcctggatggtgtgtatgctgcgaatcggcttgctacggcttcgtgtgatgtgcatttggatgcactaatttttgggttgtcgtttgtggctgttatcccccagggggatgggtcggtgttggttcgtccgcagtcaccaaagaattgcacaggccggttttctgccgatgggtctcgtttggatgctggccttgtggtgcagcagacgtgtgatcctgaggttgttgaggcggagttgttgctgcctgatgtgattgttcaggtggagcggcggggctcgcgtgaatgggttgagacgggccgtatcgtgaatagtcttggtgcggttccgttggtgcctattgtgaatcgtcgccgtacttctaggattgatggccgttcggagattacgaggtctattagggcttacacggatgaggctgtgcgcacactgttggggcagtctgtgaatcgtgatttttatgcgtatcctcagcgttgggtgactggcgtgagcgcggatgagttttcgcagcctggctgggtcctgtcgatggcttctgtgtgggctgtggataaggatgatgatggtgacactccgaatgtggggtcgtttcctgtcaatagtcctacaccgtattcggatcagatgagactgttggcgcagttgactgcgggtgaggcggctgttccggaacgctatttcgggtttatcacgtctaacccacctagtggggaggctttggctgccgaggaatctcggcttgtgaagcgtgctgaacgcaggcagacgtcgtttggtcagggctggctgtcggttggtttcctggctgccaaggcgttggattctcgtgttgatgaggccgcgttttttggtgatgttggtttgcgttggcgtgatgcttcgacgcctacccgggcggctacggctgatgctgtgacgaagcttgttggtgccggtattttgcctgctgattctcgtacggtgttggagatgttggggcttgatgatgtgcaggttgaggctgtgatgcgtcatcgtgctgagtcgtctgacccgttggcggcactggctggggctatatcgcgtcaaactaacgaggtatgataggcgatggcttcgggtgctatgtcgaggtttgctgcgactgagtatcagcgtgaggcggtcaggtttgctgggaagtatgcgggctattatgccgagttgggtcgtttgtggcattccgggaagatgacagatgcgcagtatgttcgtttgtgtgtggagttggagcgtgccggccatgatggttcggtatcgttggctgccaggtttgtgtcggattttcgccggttgaatggtgtggatcctggtttgattgtgtatgacgagtttgatgctgcggcggctttggctaggtcgttttcgactatgaagattcttgagagtgacccggatagggcgaatgatacgattgatgcgatggctgcgggttttgatcgggctgttatgaatgctggccgtgacacggttgagtggtcggcgggtgcgcagggtaggtcgtggcgtcgggttactgatggtgatccgtgtgctttttgtgccatgttggctacgaggtcggattatacgactaaggagcgggcgcttactactggtcatacgcggcgtcataagcgtggtggtaagcgtccgtttggttcgaagtatcatgatcattgtggttgtacggtggttgaggttgttggcccttgggagccaaatagggctgatgccgagtatcagaggacgtatgagaaggcccgtgagtgggttgatgatcatgggttgcagcagtcgcctggtaatattttgaaggctatgcgtactgttggtggcatgagataatttgatgtggtttccggttgtgcgccgccggttattggtgcacagggttgtctcccgcacgggggtcaacaatgttgtgttgttttccgcaaggagtgtagggttaggctatggccgatcagagtgttgaggaacagaatgttgacaatgatgttgtggagtccggaaaggataacggcattgttgatacagtaaaagacgatggcgggcaggaggtagccgacaatcagttgaagaatgaaggcgagggtaaatcgccggggactgattggaaggcggaggcccgtaagtgggagtctcgtgctaaaagtaatttcgccgagttggagaagcttcgtacatcgagtgacgattctggatctactattgatgagcttcgccgcaagaatgaggaactcgaagacaggatcaacgggtttgttcttgagggtatgaagcgcgaggtggcttcagagtatggtttgtccagtgatgcgatcgctttcttgtcgggtggcgataaggagtcgcttgccgagtctgcgaaagctttgaagggtttgatcgaccatagtagtggtggcgcgggtgtgcgccgtcttgcggggagtgcccccgttgatgatgttaaacgacgtgagggtgtcgcgtttgtggatgctcttgtcaataattctaggagatgatttctgatggctgacgattttctttctgcagggaagcttgagcttcctggttctatgattggtgcggttcgtgaccgtgctatcgattctggtgttttggcgaagctttcgccggagcagccgactattttcggcccggtgaagggtgccgtgtttagtggtgttcctcgcgctaagattgttggtgagggcgaggttaagccttccgcgtctgctgatgtttcggcgtttactgcgcagcctatcaaggttgtgactcagcagcgtgtctcggacgagtttatgtgggctgatgctgattaccgtctgggtgttttgcaggatctgatttcgcctgctcttggtgcttcgattggtcgcgctgttgatcttattgctttccatggtattgatccggctacgggtaagcctgctgcggctgtcaagtcttcgctggataatacgaagcatattgttgatgccacggattctgctacgaccgatctggtcaaggctgtcggccttatcgctggggccggtttgcaggttcctaacggtgttgctttggatccggcgttctcgtttgctttgtctactgaggtgtatccgaaggggtctccgcttgctggtcagccgatgtatcctgccgccggttttgccggtttggataattggcgcggtctgaatgttggttcttcttcgactgtttcgggtgccccggagatgtcgcctgcttctggtgtgaaggctattgttggtgatttctctcgtgttcattggggtttccagcgtaacttcccgatcgagcttatcgagtatggtgacccggatcagactgggcgtgatctgaagggccataatgaggttatggttcgtgccgaggctgtgctgtatgtggctatcgagtcgcttgattcgtttgctgttgtgaaggagaaggctgccccgaagcctaatcctccggccgagaactgattcatttgttgcggtgatatgtatatgtgcagggggtggtgttgatgggtatcattttgaagcctgaggatattgagcctttcgccgatattcctagagagaagcttgaggcgatgattgccgatgtggaggctgtggctgtcagtgtcgccccctgtatcgctaaaccggatttcaaatacaaggatgccgctaaggctattctgcgtagggctttgttgcgctggaatgataccggggtttctgggcaggtgcagtatgagtctgcgggtcctttcgctcagactacacggtctagtactcccacgaatttgttgtggccttctgagattgccgcgttgaagaagttgtgtgggggtgatggtggggctggtaaagcgttcactattacaccgaccatgaggagtagtgtgaatcattctgaggtgtgttccacggtgtggggtgagggttgctcgtgcgggtcgaatattaacggctacgctggccctttgtgggagatatgatatgaccagttttccttatggtgaaacggttgtgatgcttcaaccgactgttcgtgtcgatgatcttggtgacaaggtggaagactggtctaagcctgtcgagactgggttccataacgtggccatctatgcttccgtttcgcaggaggatgaggccgcggggcgtgactctgactatgagcattggtcgatgcttttcaagcagcctgttgtgggcgctgattatcgttgcaggtggcgtatccggggtgttgtgtgggaggctgacgggtctcctatggtgtggcatcatccgatgtccggctgggatgcgggcacgcagatcaatgtgaagcgtaagaagggctgatgggtagtggctcaggatgtgaatgtgaagctgaacttgccgggtattcgtgaggtgttgaagtcttctggggtgcaggctatgttggctgagcgtggcgagcgtgtcaagcgtgcagcctcggcgaatgtgggcggtaacgctttcgataaggcccaataccgtaatggtttgtcgtcagaggtgcaggttcaccgtgttgaggctgtcgctcgtataggcaccacatataagggtgggaagcgtattgaggcgaagcatggcacgctggctcgttcgattggggctgcgtcgtgatcgtttacggtgatccgcgtgtgtgggctaaacgcgtgctcaaggatgatggctggctgtctgatataccatgcaccgggacagtgccggatagttttgagggtgaccttatttggttggctcttgatggtggtccgcagttgcatgtgcgtgagcgtgtttttttgcggatgaacgtgttttctgatacgccggatcgtgctatgtcgctagccaggcgggtggaggctgtgctggctgatggtgtggacggtgaccctgtggtgtactgtaaacggtctactggccctgatttactggttgatggtgcacgttttgatgtgtattcgctgttcgagctgatatgcaggcctgcggagtctaaataagcttattgtttttgttttaatgtaattgtttgatatttaatgggggttgtgatggctgcaacacgtaaagcgtctaatgttcgttcagcggttactggcgacgtttatattggtgacgcgcacgcgggtgatactattaagggtgtggaggcggttccttccgggcttacagctttagggtatctgtcggatgacgggtttaagattaagcctgagcgtaaaacggatgatttgaaggcttggcagaatgcggatgttgttcgcacggttgctaccgagtcttctatcgagatttctttccagctgatcgaatccaaaaaagaggttatcgagctgttttggcagtcgaaggttactgccggatccgattcgggttcgttcgatatttctccgggtgccacgacgggtgttcacgccctgttgatggatattgttgatggggatcaggttattcgctactatttccctgaggttgagcttatcgatcgtgacgagatcaagggtaagaatggtgaagtgtacgggtatggtgtgacgttgaaggcttatcctgcccagattaataagactggtaatgcggtgtcgggtcgggggtggatgacggctttaaaagctgatactcctccggttcctccttccccgaagcctccgaagcctgagccggatccgaatccgccgtctaataactgatacacatagtttgagggattgttgatagatgagtgatacaggttacacattaaagatcggtgaccgtagctgggtgttggcggatgcggaggagacggctcaggctgttcctgcccgcgttttccgtcgtgcagctaagattgcccagtcgggggagtctgcggatttcgctcaggttgaggtgatgttttctatgttggaggctgccgccccggctgacgcagtggaggccctggaggggcttcctatggttcgtgtggccgagattttccgccagtggatggaatacaagcctgacggtaagggtgcctcgctgggggaatagtttggctccacggcctgattgatgattatcgtggggccatcgaatacgatttccgcaccaagtttggtgtttctgtttatagtgttggtggcccgcagatgtgttggggtgaggctgtccggctggctggtgtgttgtgtaccgatacgtctagccagttggcggcccaccttaatggttggcagcgcccgtttgagtggtgcgagtgggcggtgttggacatgctggatcattacaggtctgctaatagtgaggggcagccggagcctgtggcgaggcctacggatgagcgtagggcccggtttacgtctgggcaggtggacgatattttggcgcgtgttcgtgccggtggcggggtgtctcgcgagattaatattatggggtgaatagtgtatgtctggtgagattgcttccgcatatgtgtcgttgtatacgaagatgcctggtttgaaggctgatgttggtaaacagttgtctggtgtaatgccggctgagggtcagcgttcgggtagtctttttgctaagggcatgaagttggctcttggtggtgccgcaatggtgggtgccatcaatgttgctaagaagggcctcaagtcgatttatgatgtgactattggtggcggtattgctagggcgatggctatcgatgaagctcaggctaaactgactggtttgggtcacacgtcgtctgacacgtcttcgattatgaattcggctattgaggctgtgactggtacgtcgtatgcgttgggggatgcggcttctactgcggcagcgttgtctgcttctggtgtgaagtctggcgggcagatgacggatgtgttgaagactgtcgccgatgtgtcttatatctcgggtaagtcgtttcaggatacgggtgctatttttacgtctgtgatggctcgcggtaagttgcagggcgatgatatgttgcagcttacgatggcgggtgttcctgtgctgtctttgcttgccaggcagacgggtaaaacgtctgctgaggtgtcgcagatggtgtcgaaggggcagattgattttgccacgtttgcggctgcgatgaagcttggcatgggtggtgctgcgcaggcgtctgggaagacgtttgagggcgctatgaagaatgttaagggcgctttgggttatctgggtgccacggctatggcgccgtttcttaacggcctgcggcagatttttgttgccttgaatccggttattaagtctatcacggattctgtgaagccgatgtttgcgtcggtggatcaggggattcagcgtatgatgccgtctattttggcgtggattaatcgtatgccgggcatgatcactcgaatgaatgcacagatgcgcgccaaggtggagcagttgaagggcatttttgcgagaatgcatttgcctgtccccaaagtgaatttgggtgccatgtttgctggcggcaccgcagtgtttggtattgttgcggccggtgtcgggaagcttgtcgcagggtttgccccgctggcggttgcgttgaagaatctactgccgtcgtttggtgctttgaagggtgccgccggggggcttggcggcgtgtttcgcgccctgggtggccctgtcgggattgtgattggcttgtttgcggccatgtttgctacgaatgcccaattccgtgccgctgttatgcagcttgtgggtgtggttggccaggctttggggcagatcatggccgctgtgcagcccctgtttggtttggttgccggggttgtggcccagttggcgccagtattcggccagattatcggtatggttgccggtttggctgcccagctggtgcctttgattagtatgcttgtcgcccggctggttcccgtgatcacgcagattattggtgcggtgacacaggttgctgcaatgttgttgccggcgttgatgccggttattcaggctgttgttgctgtgatacggcaggttgttggtgttgtgatgcaactggtgccggttttgatgccggtgattcaacagattttgggtgcggtcatgtctgtgctgccacctatcatcggccttatccgttcgttgataccagtcatcatgtcgattatgcgtgtggtgatgcaggttgttggtgccgtgctacaggtggtggcccgcattattccggttgtgatgccaattgtgacagctgtgatcgggtttgttgcacgtattcttggtgctattgtgtctgctgcagcccgcattattgggactgtcacccgtgtcattggatgggttgtggcccattttgtgtctggtttggcgcgtatgggttcggttattcaggctggctggaatcatattagggcgtttacgtctgcgtttattaacggtttcaagtcggtgatttctggcggtgtgaacgcggttgtggggttttttgctcggctgggttcttctgttgcttctcatgtgaggtctggttttaacgcggctcgtggcgctgtttcttctgcgatgaatgctatccggagtgtggtgtcttcggtggcgtctgctgttggcgggtttttcagttcaatggcttctcgggttcgtagtggtgctgtgcgcgggtttaatggtgcccggagtgcggcttcttctgctatgcatgctatggggtcggcggtgtctaacggtgtgcatggtgtgctgggttttttccggaatttgcctggtaatattcggcatgctctcggcaatatggggtccttgttggtgtctgctggccgtgatgtggtgtctggtttgggtaatggtatccggaatgctatgagtggcttgttggatacggtgcgtaatatgggttctcaggttgctaatgcggcgaagtcggtgttgggtattcattccccgtctcgggtgtttcgtgaccaggttggccgccaggttgttgccggtttggctgaggggatcaccgggaatgctggtttggcgttggatgcgatgtcgggtgtggctggccgtcttccggatgctgtggatgcccggtttggtgtgcgatcgtctgtgggctcgtttaccccgtacgaccggtatcggcgtgcgagtgagaagagtgttgtggtgaatgtgaatggcccgacgtatggtgatcctaacgagtttgcgaagcggattgagcggcagcagcgtgacgctttgaatgcgttggcttacgtgtgattgggggtgtggttcatgtttattcctgacccgtctgatcgttcgggtttgactgtgacatggtttatggatccgctgtttggtggggagcgtgtgcttcatttgacggattacacgggtgcgtctcctgtcatgttgttgaatgattcgttgcgcggtttgggtgttcccgaggtggagcatttttctcaaactcatgttggggtgcacggctcggagtggcgcgggtttaatgtgaagcctcgcgaggtgacattaccggttttagtgtcgggtgttgacccggatccggatggcgggtttcgtgacggttttttgaaggcgtctgacgcgttgtggtctgcgtttcctccgggcgaggtaggggagttgtccgtgaagactcctgccggtgttgagcgtgtgctaaggtgtcggtttgattcggttgatgacatgtttacggttgatccggttaatcgtggctatgcgcgctatctgttgcatttgacagcttatgatccgttttggtatggggatgagcaaaagtttcgttttagtaacgcgaagttgcaggattggttgggtggcggccctgtcggcaaggatggtacggcgtttcctgtggtgttgacgcctggtgttggttcgggttgggataatctgtctaataagggtgatattcctgcgtggcctgtgattcgtgttgaggggcctttggagtcgtggtctgtgcagattgatggtttgcgtgtgtcttctgattatcctgtcgaggagtttgattggatcactattgatacggatcctcgtaaacagtctgcattgttgaacgggtttgaggatgtgatggatcgtttgaaggagtgggagtttgcgcctatcccgcctggcggttctcggagtgtgaatattgagatggttggtttgggtgccattgttgtgtcggtgcagtacaggtttttgagggcttggtgaatagttgatggctggtcttgttccgcatgtaacgttgtttacgcctgattatcgccgtgtggcgcctatcaatttttttgagtcgttgaagttgtcgttgaagtggaatggtttgtcgacgctggagttggtggtgtctggggatcattctaggcttgacgggttgacgaggccgggtgcacggctggttgttgattatggtggtggccagattttttctgggcctgtgcgtcgggttcatggtgtgggtccgtggcgttcttcgcgggtgactatcacgtgtgaggatgatattcgcctgttgtggcgtatgttgatgtggcctgtgaattatcgccccggtttggtgggttcggagtggcgtgcggacagggattatgcccactattcgggttcggcggagtcggtggctaagcaggtgttgggggataatgcttggcgtttttcgcctggtttgtttatgaccgatgatgagagtcgtggccgctatattaaggattttcaggtgcggtttcacgtggtcgccgataaactgttgccggtgttgtcgtgggctcggatgactgtttcggtgaaccagtttgagaatgtggtgaaggatcagcgtggtttggtgtttgattgtgtgcccgcggtgacgcgtagccatgtgttgactgccgagtcgggttctattgtgtcgtgggagtatgtgcgtgacgccccgaaggctacttcggtggtggttggtggccgcggcgaaggcaaagatcggctgttttgcgaggatgttgattcgatggccgaggatgactggtttgatcgtgtcgaggtgtttaaggatgcccgtaacacggattctgaacatgtgcatctcatcgatgaggctgagcaggtgttgtccgagttaggggccacgtcggggtttaagatcgagttggccgagtcggatgtgttgcgttttgggccaggcaatctgatgccaggggatttgatttatgtggatgtgggctcggggcctattgaggagattgttcggcagattgatgtggagtgtgattcgccgggtgacggctggacgaaagtgacaccggttgcgggggattatgaggataatccgtcggcgttgttggctcgccgtgtggctggtttggctgcgggtgtgcgggatttgcaaaaattctaattgttgggggtttgttgtgggtattgtgtgtaaagggtttgatggtgtgttgaccgagtatgattgggctcaaatgtctggtctgatgggtaatatgccgtcagttcatgggcctgacgattttcgtgtgggcactactgttcagggtgctacggtgttgtgtgaggtcctgccggggcaggcttgggctcacggggtgatgtgcacgtcgaatagtgttgagacggtgacggggcagctgcctggtcctggtgagactcgctacgattatgtggtgttgtctcgggattgggagcagaatacggccaagttggagattgttcctggggggcgtgcggagcgtgccagggatgtgttgcgtgccgagcctggcgtgtttcatcagcagttgttggctactttggtgttgtcgtctaacgggttgcagcagcagttggataggcgtgccgtggcggctagggttgcgtttggggagtctgctgcgtgtgatcctacccctgtggagggtgaccgtgtgatggttccttcgggggctgtgtgggctaaccatgctaacgagtggatgttgttgtctcccaggattgagacgggttcgaagtcgatcatgtttggcgggtctgctgtgtatgcttacacaattccgtttgagcgcccgtttggtagtgcgcctgttgtggtggcgtctatggctacggcggctggtggtacgcagcagattgatgtgaaagcctacaatgtgactgccaaggattttagtttggcgtttattacgaatgatggttcgaagcctaacgatgtgcccgcaatagctaactggattgctgtcggcgtgtgactgtacaggtgttgtggcggatgttgtaatgttggggggctgtggtgtcgtggtttactcctgcactggtggcctctatctgtaccgcgttggccacgattttgggttcagttcaggcggtcacatctaaatcgaggaagcgtttacgcaggctatctgcgcaggttgatgcgatggaagagtatacgtggggtgtgcggcgtgaggtgcgccggtttaacgcgaggcttcctgatggggtggagcctatgcatcttcctgatttgcctgagtttttgaaagatactgttgagggtggaggtgagtagggttgagggagttggaggaggagaagcggcagcgccgcaattttgagaaggcttccctggtgttgctgttcctgtcgcttgtgctgttgacggtggttgccgggggtgctttgcgtttcggatcgctgtcttctgagcgggattctgagcaggcgagggcccagtcgaatggtacagccgctaaggatttagccaaccgtgtgcggcaggtgtgtgcgcagggcggccaggagtcggtgcggcttcaccggtctggtttgtgtgtggatgcggtgcgtgttgagcggagtgtgcagggtgtgcctggccctgccggtgtgcgtggccagcaagggcccgccggtgctgacggccgggatggcagtaatggttcggctggtgttgttggccctgttggtccgcagggttccccgggtttgaatggtgtgaaaggacctgacgggttgcctggggctagcggcaaggatggccatgatggtgttccgggccgtgcaggtgttgacggcgttgccggggttgatggtaaagatggtgcgaatggcgccgatggtgagcgcggtgatgtgggcccttcaggtcctgccggcccgcaaggtgcacagggtgaacggggtgagcgcggcaacgccggtgcgaacggatccgagggtaaagacggtaaggatggccgttccgtggtgtccgtgtactgttctgagggtcgcctggttgtgaaatatagtgacggtgtggcttctacaatatcgggctcggtggcctgccagggtgtgaggccgtcgcctatagtgaccatatcatcccacaaatagaaaggagtggctgtgatggtagtgtttggtggtggtgtgtggtgaggtttattcctgcggcgcatcactcggccggttcgaatagtccggtgaaccgggttgtgattcatgcgacgtgcccggatgtggggtttccgtctgcctctcgtaaggggcgggcggtgtctacggcgaactattttgcttccccatcgtcgggtggttcggcgcattatgtgtgtgatattggggagacggtgcagtgcctgtcagaggggactattggttggcatgccccaccgaatccgcatagtttgggtatagagatttgcgcggatgggggttcgcacgcctcgttccgtgtgccggggcatgcttacactcgtgagcagtggcttgatccgcaggtgtggcctgccgtggagagggcggcggtgctgtgccggcagttgtgtgacaagcatggtgttccgaagaggaaactgtctgtggccgatttgaaggccggtaaacggggtgtgtgtggccatgtggatgttacggatgcgtggcatcagtcggatcacgatgatcctgggccgtggtttccgtgggacaaatttatggccgttgtcaacggcggcagtggagatagtggggagttaactgtggctgatgtgaaagccttgcatgatcagattaaacaattgtctgctcagcttactggttcggtgaataagctgcaccatgatgttggtgtggttcaggttcagaatggtgatttgagtaagtgtgttgaagccttgtcgtgggtgaagaatccggtgacagggaagctgtggcgcaccaaggatgctttgtggagtgtctggtattacgtgctggagtgtcgcagccgcatagacaggcttgagtcgactgtcaacggtttgaaaaagtgatggtggtttgttgtgggtaaacagttttggttgggcttgtttgagcgtgccctgaaaacttttattcaaacgtttgttgctgtgttgggtgtgacggcgggtgtcacgtatactgcggagtcgtttcgcggtttgccgtgggagtctgccctgattacggccggggttgctgcaatactgtcggttgctacctcgtttggtagcccgtcgtttgtggccggcaaacctaaaaccacggttgtggatgctgagcttgttccacccgacgatgggggcatggttgagccgcactcggtggatgtgtcggatcctggcatgatcgagccgacagatgatgttgatggttttgccggctatgtgccgaggcgtgccgccgagtcggaggttggcacggtagagtctactgttgcataattgaatatgtgtgtgtgccccagcggtgctgccacgatcgtgtggtggttgccgctggggcactatttttgtgtctatagtattctatgattcgttgttgttgatggtttcctcaatcgtctgatacaggtggaggcaggtagagatagtttcgttggcctggtctagaacgttctggccgataacatttttgtggttgtcgcggtggcagatgatagaccgcatgatatcgtcggccgcagattgtagtagtttggtttggtatgcgattccggcgagccagtctatggcttcctggcttgccagtgtgtcgtctggaatgtcactggtgttgctgttgtttgtggggtatcctgcactgtcgcagtcccacaagatttcgctgcactcgtctagcgtgtcctggtcgatgtcgagattgtcgaggctgatttctttaacagtaaggttcacgttgtcgagggagatgggtacactgtactggttttcgacaccgccaacaatgttttctagctgttgcatgttggtgggctgttgttggatgattcggtgtaccgctgttttgagggcagtgtaggggatattggttatgttgttcatggttttatcccatccctgtgctgtcgtcgctatcgtctggatagtatctactgtttgcgtagcctgtgagggtgatgagtgtttggtctgcccactgtttcacggtttgtcttgtcaccccgagccgttgggctgccaccgaataggtttgatcatacccgtatacttcacggaatgctgccaaccgtgccaaatgttttcgctgtttggatggctggcaggtgagggtgtagtcgtcgatggctagctgcaaatcgatcatggtgacaatgttgttgccgtggtgttgtggcgcggttggtggtggtggcattcctggctcgactgatggtttccatgggccgccgttccagatccattgggcggcttggatgatgtcggcggtggtgtaggttcggttcatgtgtcatcccctgaataggttgtcgaggttgtctgggttgctggtgttggtggtgtcgaatcgtccgacgcagtggcagtagtcgtacatgagtttgataatgtgttggtggtcgccgaggtaggtgtttccgctgatactgtaggtggctgtgccgtctttactgatggtgtatttggcggtgatggtttcgggtgtttgggtgttggtgatgatggcggtggtggtggcgcctactgtttggagtatggtggtttgggttccgtcgtcgagggtggttgtgaccattttggggttatccttttagttgctggtttgtgtgtcggctagatgaatgatatcggataaaggtttcggttggtctaggtgttgtatggttttgttggctagccgtttggctaccctgtagcatattttgatgtagtgtttgttgtctaggttgtggtattgttcccgcaccgcaatatatagtagggagtcttggtacaggtcgtctgcactgattgcggggtagtgtgtggctactttggtgcatgcccggttgagtgtgcgaagatgatggtttgtggcccatacccacgatgcggtggtggccaggtctgcttttgttggtcgtctgctcatggcactatctcatctcgctatctggtagttgtttggtgttttgttgtggatagtgtagcacactagtccggggtggccggtggtgcctgtgcggtgccgaaaccatgtggattcgccttccatggatgggcattggatgaaggtgcgttgtccttgctcggagatttctaggtggtgccggtgccctgccatgaggatgtgggatgtggtgccgttgtggaattcttggccgcgccaccattcgtactgtttgccggttttccattggtgcccgtgggcgtgcaggatttgtgtgccggccacatcaacggtggtggtcatttcgtcccggctggggaagtggaagtgaaggttgggatattggttgttgagctggtaggcttctgcgatggcccggcagcagtccacatcgaaggagtcgtcgtaggtggtgacgcctttaccgaagcgcacggcttcaccgtggttgccggggatggatgtgatggtgacgttggcgcagtggtcgaacatgtggatgagttgcatcatggccatgcgggtgagcctgatttgttccgtcaggggtgtttgggtgcgccaggcgttgttgcctccttgtgacacgtatccttcgatcatgtcgccgaggaatgcgatgtggactcgttgcggtttgcctgcctgttgccagtagtgtttggcgactatgagggagtgtaaatagtcgtcggcgaagtgtgctgtttctccgccggggatgcctttgccgatttggaagtctcccgccccgatgacgaaggccgcattgctatagtcggtgtgggtgtcctgttcgggttttggtggctgccagtcggctagtttatcgacgagttcgtccacgggatacgggtttgttgcgggttggtggtcgatgattttttgtacggatcggcctgtttctccgttggggagtgtccattcggagatgcgtgtgcggcgtacagtaccattggctagattgtcgtcgatggtgtcgatggcgttgtcgtggttggctagctgtgtgagtagccggtcaatattgtctatcactggttttcctcctcttgcggggtggtgttggcttgtttacggcgatagtcttttataacggtggcggagatggggtatcctgcctgggtgagctgttttgctagccacgaggcggggatggttttgtcggcgagcacgtcggcagctttgttgccgtagcgttgaataagggtttcagttttggttgccatgatgtcctatcggttgtgtggtgggctgccatcctgtgcgacagtcgccgtcgtgtcctggtttgcgggtgcaccacgatacggttccgtctgtgtggttgagtgttttaccgcacatgacgttttgtagatgctccggcagctcgctattgctatcgtcttgctcgtctagcaaagttttttgttgggtgaaaaactcggacacggtgccgttgtggactgggagtatccatgttttccattgttgttgtagccgggtgttccagtggaattgttttgctgcgttcgtggcttgtttgatggttttgaaatagcctacaatgatccgttgatggtcactatcgggcttgtgtggccctttccaatattgggcagctacagcgtatttgatgttgtctgtgaagcgcccccagcagtattccaccatgtgtgatagtaccttgtcgggcatgtctcgtacttggttttcgtcgagccactcgtcgacaataatgttgcgtatggctcgcttgtctttggtggtgggcttgaatgctatgctcacaatgctggcctgtcgtcttgcatgaaatcattaaaggatgattcgcttgtgcggcgtgcttgcgtgatttgctggtcagtccagtcggggtgttgctgtttcaaatagtaccagcggcacgcattgtaggtttcgtcttggagccgtgtgagattgttttcggtgatgatttgtttccacattgtccatgacacgtcgagccggttgaggatttcgagggctgggatgttgaattggtcgaggaagaggatttcgtgggtgtagtagtttttctcgtattggtcccatccgcttcggtgcctgttgggctggtttttggggtaggcttcccggcagattttgtgtaaccgtttggccatgtcgtcgggtagtttaatgtcggggttggcgcggatcatggatcgcatcccatcataggtggtgccccaggtgtgcatgatgtaggtggggtcttcgccatcagcccatttttctgcacagatggcgaggcggatgcgcctcctggctgtttggctggtgttgcgccggttggggattgggcacgtgtcgaggggatccatgatgttttagtgtacctttctggtttcgtgttgttgacgtgttttactgtagcacagtgtctagtgcttgtgtcaaccctgtttttccggcctgaaggtaggtgtctgtgacatcccccagggtgaggggcacatgggtggcttgggggagtgctgcctggagggtttgcgccatcttgtctcccgcggggtctgggtcggaccatatgtagatgtggtcgtagccttcgaagaatttggtccaaaagttttgccacgaggttgcgccgggtagggctacggccgaccatccgcattgttcgaggatcatggagtcgaattcgccttcgcaaatgtgcatttcggctgccgggttggccatggcggccatgttgtagatggagcctgtgtctcctgccggggttaggtatttggggtggttgtgggttttgcagtcgtgcgggagtgagcagcggaaacgcatttttcttatttcggctggctgcccccaaacggggtacatgtaggggatggtgatgcactggttgtagtcttcatgacctggtatgggatcattgtcgatgtatccaaggtggtggtagcgggctgtttcttcgctgacgcctcgcgctgagagcaggtcgagtatgttttcgaggtgggtttcgtagagggctgaggctttctggattcggcggcgttccgcaatgttgtatgggcgtagtgtgtcgtacattcgggttttcttcttctaatcgttgttgtagcttggcgagtccgcctccgacaccgcatgtgtggcagtaccagacgcccttgtcgaggttgatgctcatggagggctggtggtcgtcgtggaacgggcagaggatgtgttgctcgtttcgtgacggattgtagcgtatccggtagatgtcgaggaggcggcaggtgtcagaggtgtgggaggagctcgttgagggttgataccacataggcttcgctccatggcttgttgcgctgtttcatcactacgagtccgatggtggaattgttttgtttgtttcggtgtgtttcgtagttgcgtgcctcccggctggcttgtttcacgaattgggctaggtgtggttgcccggctttcgcctcgatcacataggttttgttgccggttgtgaggatcaggtctccctcgtcttcgcggccgttcagatggaggcgctcgatatcgtgtccggtgtcgcgtagctggtgcaataatcgtgtttcccattcggctccggcccggcggttgcgtgcctgttgtgtcgccatcatagtcctttgtgtgttttggtcatgttccatggctgtttttcggcgagtggcccgaagaatgtgtattctgggtaggctcgtagccgctcgtatcgggtgccgtctgggctggatcgcccggtgcgctgtttcaacactgcgatgcgtgcctctgccgggatcgatagcccgttgccgttatcctcgccaccatacaatgagactccgaggatgagttgtggtttttcggagaggccgtttttgatttccctgcgtgccggggggtgttcgatgtcggagccggttttgtcggtggcgtggtgggtgacaataatggtggagcccgtatctctacccaatgctgtgatccattgcatggcttcttgctgggcctggtagtcactctcgcagtcttggatgtccatcaggttgtcgataacaatgagtggtgggaaggtgttccacatttccatgtaggcttgcagttccatggtgatgtctgtccaggtgatgggtgactggaatgagaatgtgatgtgttggccgtggtggatgctgtctcgatagtattctggcccatagtcgtcgatgttgtgttgtatctgtgtggtggtgtgttgggtgttgagtgagatgattcgtgtggaggcctcccagggtgtcatgtcccctgatatgtagagggcgggctggttgagcatcgctgtgatgaacatggctagccctgatttttggctgccggagcgccccgcgatcatgactaggtcccctttgtggatgtgcatgtccaggttgcggtagaggggttctagctggggtatgcggggcagctcggctgcggtttgggaggctctctcgaaggatcgttggagagagagcatcggagcctttatctatctgtctatcggttggatgttgttttggtggtcagatggagtcgatatcgatgtcagcatcagcaggggctgtggtgtcgtctagctggccgttatcgcgcttgtctacgtattcggcaaccttatcgtagatggcgtcgtctaatggtttgagcacgaccgcgttgaacccgtttttggtgcgtacggtggcgagtttgaaggcctgctcctcgccaaggtaggtttctagatcgcggatcatggagtgtggacggtcgttgttgccgcgtgctttctcaatgatagcgttggggatggtttctggggtgccgttattgagatcctcgagggtgtggaagatggtgacatcagcgtagatgcggtctgcgacctgtccaccgtagccttcggtgttgtgttctacgtcgcggactttgaaggcgatggcggtggcgtcctggtttcgggacgggttgaagaaggtgctgttgctgttgttgcggtagttggcaagtcccattattgtatcctttactgttgtgtctgttattgttggtttctgttggttatcgggtgaggctgtttcgtttgctgcggaaagcctcggaaacgtcactgttactggtgatgatctttttgtactgttttagaaggtcggctagctgtgtcttgcttgttgcattgttgattttgttgatgacgatggtgttttctttggatgcgatgttgtccacgtagtctttggcggcctggttgtatcggtcttggaggatgatggatgcgctcgctacgagtgttgctagatcccagtctttggacacgtcatcgtttttgagtccgcccaataaatcgatgatggcctgttttgtctgctctgctgtgtctcctcggatgaccgcccatggtgcagcatagtctccaccatatttgagtgtgatcgtgagtcgatcattgtcgatcttgtctttatcggtcatttggtgtccttttctttattgtctgtttggggtggctgtacggtggattctaccgggtacctgtaggcgtctttgccgtctacagcccagcaggcgtccttgacagggcatcctttgcagagtgtggtgacgtgtgggacgaagatgccttcgctgattcctttcattgcttgactgtacatggatgatacatgccggtaggtgttgttgtcaaggtcgtagagttcggtggatgtgccttgtgtcggggacttgtcgtcgttgcggctggtggctggcgtccaaaacatgcctttcgtgacattgatgccgtgttgggcgagcatgtaccggtaggtgtgcagctgcatactgtcggcgggtaggcgtccggttttgaggtcgaggatgaatgtttcgccggtgtcggtgtcggtgaaaacgcggtcgatgtagccgactatttttgtgtcatcgtcgaggatggtttctaccgggtattcgatgcctggtttaccgtccaggattgcggtgatgtattctgggtggttgcgcctccatgttttccagcggtccacaaaggtggggccgtaaaccatccaccagtcgtagtctttcttgtgtggcccgcccgactcgcacatgtttttgcatattcttccggagggtttgatttctgtgccttcggattcggcgagggcgacttgggtgtcgaaaatgtttttgaaggatgcgagtttgtctggtagtgcagggtattcggcgggattgtacaggtgtagatcgtattgttcggtgatgtggtgtatggcgcttccggcgatggtggcgtaccaggtgtgataggtggctttgtatccgtgttggaggcgccatttttctccgcattcggcccactgggtgagtgaactgtaggagatgtggcctggatggtggatggttttcgggtattgtgctagaggcattatttgtcgcttttgttccatgggttgcgggtgtcttggccggcgtggtgttgctggtatgcgaggagtgcgaggcagtgccaggcggcgtgggccagatgcgacaaatgtgattcctggtcgaggttgtttccttgctgccatgatagtaggtggcggtagagggcgtcgacactgtggctccacgggtatcctccggtccagttgttgtcgccgtatttggtggcaccgtagcctgctacttcgccgagagcgtgaagggatgcggggtcgatgagggagagcctgcagagtttcaattcttttcgggcaccggtgttggggtcggtgtacatgcgggtgggctcatccatgagatgtgtgctccttaagggtgggttactggttgttgttgtgggcgagtgctactgcgagaataatgatggcgagggtttcagcgatcagtatgggtgttgtgatcatttgctgtctttgggcttgtatgtgagtgttgatgcacccaggagggtggcgagggcgcatgcggcaataatggcgagggctgccttgtgtggggtgccggttgcgtacatccatgtgatgatgccgccttggatccaggcgaggctggtgaagaacgtttcgtagctgtgtagctcaatgttgttgttgggtgtgttcatgcttgctcctgaagaatggtgttgatggttttataaatgttgtacaggtcggtttcgatagataacagttggttgatttggtggtcgaggttgatgtctgggttgagggtgttgatgcgggatgcgatgtcggtggctgtgcgtagtgtgccgccggtgtggtgaataatgtgtgccgtgtcggcgagtccggtagtgacagcgtagtgggagaggagaggcatagcggtgatgctccttggcgggttactgttgcgggttgatgttgaggtcggtgacgtgctggtggtcttctgttccggtgacgaggcagtggacggtgacgggtagtttggatgcgccgggctgtttcgcggttgcgccgtagacgatgctgaatgtgtctttaccgatggttttgtggagttggaggtcgatgtcggggttgccgttccagttgacaccttgtgcggctgcctgttgttcggctttgtggttgcaggtgtgtgctgccgtgatcatggtgagtccggtggcggtttcttcaccccttgcttgggcttgcttgtgggctttctgctgttcggcttgtagggagcgggtggcggcggcctggcgggccttcttctcggctttgcgctgttgggtagtcttgggggtccattcggtgttggctgtggtggcctgtggggctggctgtgaggcgaggggcggattgtcgtctggggctggcatgaatgaggcggcggcaatgatggcggctgtgatgccggcgatggtgtagccgtttttcttgttcatgttttgcttcccctttccggggtgttgttcgttgctgacatgatcaatgatggtgtgggcggtggcccatgtcaagggtgcgctcaacgattgtgagcgatgcttgcgtggctaggtgttttatcgggcacacagggtgagtaggtggccaacattgatgcgggtcacgttccaatagagttgcgtggcttcaccgccggtgagcggcttccactcatcatggctgaacacggtgccgtcggtggctatgaatgtgttggggcgtagcttgtggagttcggcttccacatgctgccggtaggcttcggcaaggccctcaaaatcgaggtgttcgcaggagaggttttcgaggcgtgtcaggtcgaaaggtacggggcagtcgtagctggctggggtgtaaagctgggtgaaatggttggcgatcttctgcataataggtttcctttcgtgtgatgtgttggtggttttatcgggttactgcggcgatgatggcgtcgaggtcgatcgtgtcgatcatgtcgtggagttcctcactctcgccctcggtgagtgactgccagttgcgtggcccatacactgcaccgtcgagagtgacagtccagtctggccggatgagtcgtatggcttcttgtactttagcatggtacatgcggcgcaccatatcgagatcgatgtcgtctgaatggtttccggtgaggctgtggaggctgagcgggtcgatttctgtctgcctgtagagggatgtgaaggatggggtgatgagtgtgtcatccattggtgtgctcctttccggggatgctgatgtatgggttgttgtggtttctagagtgtgtaggttgcgaccccacagtcaaggctgcgctcaatcggattgagcgtttcatgctggagtgtggggtgtgacagatgtcacttaagcctttattgcctctctcggcgtctcaaatcttctaggggtaggattatgcagggttgaccctgctgatcgattctagggcccttctagggcgtctcaggggtatgtctgggtgatagcgggtgtgacagatgatccagcgagtcaaggtgccgagcttagacataagatctatcatctaggtgtgtgagatgtatcacatcctcctggcttggtgtgtactctcaagactactctgccgatctggcgtggagggtgtagcccagaaatgccgtttaaagccttcacacggcgcctaggagcgccttgcagggtgggggctaggtatttatacccccagcatattctgatcgattctagatgcctccaggagcatgatacacgatcagccatcaagacgcagctcatcagcccctatcctgcttagctaagcctacactatgtggacagtgtggaatgctaagagggaagaaggacgcggtaaaagaaagaaggggagcatcagccttcacacctgaggcacttaagttaaccttagggtcttagcactgagcatttagcaccgagcccctcaagggctcggcatcagcccgagcaggctcagccctgaaaggagtacacgccatcagggaaggcttgagagtatgaggagcctcagcgacgagtactcgaaagcctgagggaagaccatcagcactgatgggcctagcgtgttcggaaaagacacaggagtacagtatgacaactgtccgggagtgaaaccccttccggctagggcaaacacccgtcctagactagcccacacccttagctgttaaccttccgttcattaaacgttaaggaaacttttaggtttgatttttggacctttaccaccaaaaacacccttttacacccctcaaacccgcctatagagccaaatccgccagtttgactcatcccaggtggcatatgataggctggacaggtagccagctggacgcaaggccggaaagtgctgacgcacttcccaacctcgcttaccatcagtctaccaaagacttaaagacctaagggcttagcgctaaggtgctgatagcttagcaccgagcccctcaagggctcggcatcagtcttaggtacttaaagtaactttaaagacttaaagtaaatatataaccttagcagttaaacgtttaaagctttaaaccttaacacctaagttaagtataaaaccttaaaggcttagcacttaaggatataaacttaaagagttagaataaccataaagatttaaacacttaaagtaactataggactttaaaaaccttaagtacctaaagttaaccatcagtcttaaactttaatgttataacctataagtcttaaagcttataggtataataatataatataattatataagtattaaagcttataagttataaaagttttagaagagctaagaggttaaattctttacttctctactctctttggttctttctctcttctcttcttttcttcatcaggggagaagaggaacctttaccatcagcgctgatggtcttttcgccgtgtgtctcgtgtgcttggtcgcaagctcccggttacacactccccacactctctttcacctgtgtccctttaaggcttggcgtgttcggctgaaggcgtacggcgtgtcacgggaacacccttaacaccaggtaagacttaaagtgtatattatatgtagaagactttaaaaactttgagagtgtacccttcttggctgtgttctacaccgctaggcgccaagcgctaagccttgaaacgcgaacacacacccacccccatttttcttccgcgtccttcttcttttgacacagctggggggcgatgtgatctttctcacacccatgggggtagtggagaaaacaaacaccccggaacgttcaagacgccccctcaaacgcacaaaacagggcctagaatcgatcagcagggcaagggcaaggtattcatacccccaacggtttccaggccgttacagaggcaaacaagacccgtacagggctagccgaggatcggagacgtgatggcacacaccaaccgcaccgcatcctccgcccaccgccgatggcgagcacgactcatcacccaagcccgcaaacaaggacaaaccacctgcccactctgcggaaccgagatcgcctgggacacccacgacctaccaaccagccccgaagccgaccacatcacacccgtcagcaggggaggactcaacaccctcgacaacgggcaaatcatctgcagaacatgcaacagaagcaaaggcaatcgcagcgaaccaaacatcaaattccaacaacaaaccacaaaaacattgattccatggtgaaaaacccgccaacccccaccgggcacaccccctgcacacccgtgcaagacc

SEQ ID NO: 42 - DNA, 29377 bp, Bacteriophage of P. acnes
agtgaaatacctcccttttgtggttttgtctgtttgtcgactttttgtgttggtggtgagtgttgtgcagcctgagcttcctgatagtcgtgagtggtgtggggagacgcgtcgttggtggcgtgtgtggggtgaggatagccgcgcatcgtacgtgtctgatgaggagtggctgtttctcatggatgctgcggtgattcatgatgtggtgtggcgtgagggtcgcgcggatttggtggcttcgcttcgtgctcatgtgaaggcttttatgggtatgttggatcggtattcggttgatgtggtgtctggtggccgtggtgggggttctgcggtggcgatgattgaccggtataggaagcgtaggggggcctgagtaggtgtctggtgttgttgggtctcaggttcctcgtcatcgggttgctgcggcgtattcggtgtctgctggcggtgatgctggtgagcttggtcgtgcgtatgggttgacgcctgatccgtggcagcagcaggtgttggatgattggcttgctgtgggtggtaatggcaggcttgcttcgggtgtgtgtggggtgtttgtgcctcgccagaatggcaagaatgctattttggagattgtggagttgtttaaggcgactattcagggtcgccgtattttgcatacggctcacgagttgaagtcggctcgtaaggcgtttatgcggttgaggtcgttttttgagaatgagcggcagtttcctgacttgtatcgtatggtgaagtcgattcgtgcgacgaatggtcaggaggctattgtgttgcatcatccggattgtgccacgtttgagcgtaagtgtggttgtccgggttggggttcggtggagtttgtggcccgttctcggggttctgctcgcgggtttacggttgatgatttggtgtgtgatgaggctcaggagttgtcggatgagcagttggaggctttgcttcctaccgtgagcgctgccccgtctggtgatcctcagcagatttttttgggtacgccgccggggcctttggctgacgggtctgtggtgttgcgtcttcgtgggcaggctttgtcgggtggtaagaggattgcgtggacggagttttcgattcctgacgagtctgatccggatgatgtgtcgcggcagtggcggaagcttgctggtgacactaatccggcgttgggtcgtcgtctgaatttcgggacggtgagcgatgagcatgagtcgatgtctgctgccgggtttgctcgggagcggcttggctggtgggatcgtggccagtctgcttcgtctgtgattccggcggataagtgggtccagtcggctgtgggtgaggcgagccttgttggcgggaaggtttttggggtttcgttttctcgctcgggtgatcgtgtcgcgttggcgggtgctggtaaaacggattctggtgtgcatgttgaggtgattgatggcctgtcgggcacgattgttgatggtgtgggccagctggctgattggttggcgttgcgttggggtgacactgaaaaggttatggttgccgggtctggtgcggtgttgttgcagaaggcgttgacggatcgtggtattccgggccgtggcgtggtggttgctgatactggggtgtatgtggaggcgtgtcaagcctttctggaaggtgtaaggtcgggtgtgatcagtcatcctcgtgccgattcgaggcgtgacatgttggatattgctgtgaggtcggctgtgcagaagaggaaaggttctgcgtggggttggggttcctcgtttaaggatggttctgaggttcctttggaggctgtgtctttggcgtatcttggtgcgaagatggcgaaagcgaagcggcgtgaacggtctggtaggaagcgggtgtctgtggtatgaactcggatgagttggctctgattgagggcatgtacgatcgtattcaaaggttgtcttcgtggcattgtcgcattgagggctactatgagggctctaatcgggtgcgtgatttgggggttgctattcctccggagttgcagcgtgtgcagactgtggtgtcgtggcctggtatagctgtggatgctttggaggagcgtctggattggcttggctggactaatggtgacggctacggtctggatggtgtgtatgctgcgaatcgtctatcaaccgcgtcatgcgacgtccaccttgatgcactaatttttgggttgtcgtttgttgcgatcattcctcatggtgatggttcggtgtcggttcgtccgcagtcaccaaagaattgtacgggcaagttttcggctgacgggtctcgtttggatgctggccttgtggtgcagcagacgtgtgatcctgaggttgttgaggctgagcttttgcttcctgatgtgattgttcagatggagcggcggggttcgcgtgagtgggtggagacgggccgtatcgtgaatgtgttgggtgcggttccgttggtgcctgttgtgaatcgtcgccgtacttctaggattgatggccgttcggagattacgaggtctattagggcttacactgatgaggctgttcgcacactgttggggcagtctgtgaatcgtgatttttatgcgtatcctcagcgttgggtgactggcgtgagcgcggatgagttttcgcagccgggctgggtcctgtcgatggcttctgtgtgggctgtggataaggatgatgatggtgacactccgaatgtggggtcgtttcctgtcaattcgcctacaccgtattcggatcagatgagactgttggcgcagttgactgcgggtgaggctgcggttccggaacgctatttcgggtttatcacgtctaacccgcctagtggggaggctttggctgccgaggagtctcggcttgtgaagcgtgctgaacgcaggcagacgtcgtttggtcagggctggttgtcggttggtttcctggctgcgagggcgcttgattcgagtgttgatgaggccgcgttttttggtgatgtgggtttgcgttggcgtgatgcttcaacgcctactcgggcggctacggctgatgctgtgacgaagcttgtgggtgccggtattttgcctgcggattctcgtacggtgttggagatgttggggcttgatgatgtgcaggttgaggctgtgatgcgtcatcgtgccgagtctgcggatccgttggcggcactggctggggctatttcccggcagacgaacgaggtttgatgaatggcttcgggtgctatgtcgaggcttgccgcgactgagtatcagcgtgaggcggtcaggtttgccgggaaatacgctgggtattatgccgagcttggtcgtttgtggcattccgggaagatgacagatgcgcagtatgtgcgtttgtgtgtggagttggagcgtgccggccatgatggttcggcgtcgttggctgccaagttcgtgcaagattttcgccggttgaatggtgtggatcctggtttgattgtgtatgacgagtttgatgctgcggcggctttggctaggtcgttttcgactatgaagattcttgagagcgacccggatagggcgaatgacacgattgatgcgatggcggcgggttttgatcgggctgtcatgaatgctggccgtgacacggttgagtggtcggcgggtgcgcagggtaggtcgtggcgcagggtgactgatggtgatccgtgcgcgttttgtgccatgttggctacgaggtcggattatacgaccaaagaaagggcactcactactggacatactcggcgtcataagcgtggtggtaagcgcccgtttggttcgaagtatcatgatcattgtgggtgtacggtggttgaggttgttggcccttgggaaccaaatagggctgatgccgcatatcagaggacgtatgagaaggctcgtgagtgggttgatgatcatgggttgcagcagtcgcctggcaatattttgaaggctatgcgtactgttggcgacatgagatgatggtttccggttgtgtgccgccggttattggtgcacagggttgtctcccgcacgggggtcaacaatgttgtgttgttttccgcaaggagtgtaaggttgggctatggccgatcagagtgttgaagaacagagtgtcgacaatgatgctgttgagcccggaaagggcgaggacattgttgatgttgtgaaggatgggcaggctgccggcgatgatcatgccggtgatgtttccgtgaaggaggagtcttcttctggcacggattggaaggctgaggcccgtaagtgggagtctcgtgctaaaagtaatttcgccgagttggagaagcttcgcgcctcggatggtgatgcggggtctactattgatgagcttcgccgcaagaatgaggaactcgaagacaggatcaatgggtttgttcttgagggtgtgaagcgcgaggtggctgccgagtgtggcctgtcgggtgatgcgatcgctttcttgtcgggtggcgatcgtgaagcactggtggagtctgctaaggctttgaagggtttgatcgaccatagtagtggtggcgcgggtgtgcgccgtcttgcggggagtgcccccgttgatgatgttaaacgacgtgagggtgtcgcgtttgtggatgctcttgtcaataattctaggagatgatttgtgatggctgacgattttctttctgcagggaagcttgagcttcctggttctatgattggtgcggttcgtgaccgtgctatcgattctggtgttttggcgaagctttcgccggagcagccgactatttttggccctgttaagggtgccgtgtttagtggtgttcctcgcgctaagattgttggtgagggcgaggttaagccttccgcgtctgttgatgtttcggcgtttactgcgcagcctatcaaggttgtgactcagcagcgtgtctcggacgagtttatgtgggctgatgctgattaccgtctgggtgttttgcaggatctgatttccccggctcttggtgcttcgattggtcgcgccgtggatctgattgctttccatggtattgatcctgctactggtaagcctgctgcggctgtcaaggtgtcgctggataagacttcgaagacggttgatgcaaccgattccgctacggctgatcttgttaaggctgtcggcctgattgctggggctggtttgcaggttcctaacggtgttgctttggatccggcgttctcgtttgctctgtctactgaggtgtatccgaaggggtctccgcttgccggtcagcctatgtatcctgccgccgggtttgccggtttggataattggcgtgggctgaatgttggtgcttcttcgactgtttcgggtgccccggagatgtcgcctgcctctggtgttaaggctattgttggtgatttctctcgtgttcattgggggttccagcgtaacttcccgatcgagctgatcgagtatggtgacccggatcagactggccgtgacctgaagggccataatgaggttatggttcgtgccgaggctgtcctgtatgtggctatcgagtcgcttgattcgtttgctgttgtgaaggagaaggctgccccgaagcctaatccgccggccggtaactgattcatttgttgcgataatgtttatgctgtgtgcagggggtggtgttgatgggtatcattttgaagcctgaggatattgagcctttcgccgatattcctgaggggaagcttgaggcgatgatcgccgatgtggaggctgtggctatcagtgtcgccccctgtatcgctaaaccggatttcaaatatagggatgctgctaaggctatcctgcgtagggccctgttgcgctggaatgatactggcgtttcggggcaggtgcagtacgagtctgcgggtcctttcgctcagactacacggtctaatactcccacgaatttgttgtggccttctgagattgccgcgttgaagaagctgtgtgagggtgatggtggggctggtaaagcgttcactattacaccgaccatgaggagtagtgtgaatcattctgaggtgtgttccacggtgtggggtgagggttgctcgtgcgggtcgaatattaacggctacgctggccctttgtgggagatatgatatgaccagttttccttatggtgaaacggttgtgatgcttcagccgactgttcgtgtcgatgatcttggcgacaaggtggaagactggtctaagcctgtcgagactgtgtaccataacgtggccatctatgcctctgtttcgcaggaggatgaggccgccgttcgtgactcggattatgagcattggtcgatgcttttcaagcagcctgttgggggtgccggttatcgttgccggtggcgtattcggggtgtggtgtgggaggctgacgggtctcctatcgtgtggcatcatccgatgtccggttgggatgctggtacgcaggttaatgtgaagcgtaagaagggctgatgggttgtggctcaggatgtgaatgtgaagctgaacttgccgggtattcgtgaggtgttgaagtcttctggggtgcagtctatgttggctgagcgtggcgagcgtgtcaagcgtgcggcctcggcgaatgtgggcggtaatgctttcgataaggcccaataccgtaatggtttgtcgtcggaggtgcaggttcaccgggttgaggctgtggcgaggattggcaccacctataagggtgggaaaaggattgaggcgaagcatggcacgctggctaggtcgattggggctgcgtcgtgatcgtttatggtgatccgcgtgtgtgggctaaacgcgtgctcaaggatgatggctggctgtctgggataccatgcaccgggacagtgccggatagttttgagggtgaccttatttggttggcgttggatggtggcccacagttgcatgttcgtgagcaggtgtttttgcgcgtgaatgtgttttcggatacacctgatcgtgctatgagcctgtcgaggcgtgttgaggctgtccttgcggatggtgtggacggtgaccctgtggtgtactgtaaacggtctactggccctgatttgctggttgatggtgcacgttttgatgtgtattcgctttttgagctgatatgcaggcctgcggagtttgaataagattattgtttttgttttaatgtaattgtttgatatttaatgggggttgtgatggctgcaacacgtaaagcgtctaatgttcgttcagcggttactggcgacgtttatattggtgacgcgcacgcgggtgatactattaagggtgtggaggcggttccttccgagcttacagctttagggtatttgtcggatgatgggtttaagattaagccggagcgtaaaacggatgatttgaaggcttggcagaatgcggatgttgttcgcacggttgctaccgagtcttctatcgagatttctttccagctgatcgagtctaagaaggaggttatcgaactgttttggcagtcgaaggttactgccggagccgattcgggttcgttcgatatttctcctggtgccaccactggcgtgcacgctttgttgatggatattgttgatggtgatcaggttattcgctactatttccctgaggttgagcttatcgatcgtgacgagatcaagggtaagaatggcgaagtgtatgggtatggtgtgacgttgaaggcgtatcctgcccagattaataagactggtaatgcggtgtcgggtcgggggtggatgacggctttaaaagctgatactcctccttctccgaagccggatccgaatccgccgtctgagaactgatacacgattttagggattgttgatagatgagtgacactggttacacgttgaagattggtgaccgtagctgggtgttggcggatgcggaggagacggctcaggctgttcctgcccgcgtgtttcgtcgtgcagctaagattgcccagtcgggggagtctgcggattttgcccaggttgaggtgatgttttctatgttggaggctgccgccccggctgacgctgtggaggctttggaggggcttcctatggttcgtgtggcggaggttttccgtgagtggatggaatacaagcctgacggtaagggtgcctctttgggggaatagtttggctccacggcctgattgatgattatcgtggggccatcgaatatgattggaggacccggttcggttgctcggtttatgatgttggtggcccggtgatgtgttggggtgaggctgtccggctggctggcgtgttgtgtaccgatacgtcgagccagttggcggcacacctgaatggttggcagcgcccgtttgagtggtgcgagtgggctgtgttggacatgttggatcattacaggtctgctaatagtgaggggcagccggagcctgtggcgaggcctacggatgagcgtagggcccggtttacgtctgggcaggtggacgatattttggcgcgtgttcgtgctggtggcggggtgtctcgcgagattaatattatggggtgaatagtgtatgtctggtgagattgcttccgcatatgtgtcgttgtatacgaagatgcctggtttgaaggctgatgttggtaaacagctttctggggtgatgcctgcggagggtcagcgttcgggtagtctttttgctaagggcatgaagctggctttgggtggtgcggcgatgatgggtgccatcaatgttgctaagaagggcctcaagtcgatttatgatgtgactattggtggcggtattgctagggcgatggctattgatgaggctcaggctaagttgactggtttgggtcatacgtcgtctgatacgtcttcgattatgaattcggctattgaggctgtgactggtacgtcgtatgcgttgggtgatgcggcttctactgcggcggcgttgtctgcttcgggtgtgaagtctggcgggcagatgacggatgtgttgaagactgtcgccgatgtgtcttatatttcgggtaagtcgtttcaggatacgggcgctatttttacgtctgtgatggcgcgcggtaagttgcagggcgatgacatgttgcagcttacgatggcgggtgtccctgtcctgtctttgcttgccaggcagacgggtaaaacctcggctgaggtgtcgcagatggtgtcgaaggggcagattgattttgccacgtttgcggctgcgatgaagcttggcatgggtggtgctgcgcaggcgtctggtaagacgtttgagggcgctatgaagaatgttaagggcgccctgggttatcttggtgccacggctatggcgccgtttctgaacggcctgcggcagatttttgttgcgttgaatccggttatcaagtcggtgacggattctgtgaagccgatgtttgctgccgtcgatgctggtattcagcgtatgatgccgtctattttggcgtggattaaccgtatgccgggcatgatcactcgaatgaatgcacagatgcgcgccaaggttgagcagttgaagggcatttttgcgagaatgcatttgcctgttcctaaagtgaatttgggtgccatgtttgcgggtggcacagcagtgtttggtattgttgctgcgggtgttgggaagcttgttgcagggtttgccccgttggcggtgtcgttgaagaatctactgccgtcgtttggtgctttgaagggtgccgctggcgggcttggcggcgtgtttcgcgccttgggtggcccggtcgggattgtgatcggcttgtttgctgccatgtttgcgactaacgcccagttccgtgccgcggtgatgcagcttgtggctgtggttggtcaagccctggggcagattatggccgctgtgcagccgctgttgggtttggttgctgggctggtggcacggttggctcccgtgtttggccagattgttggtttggttgccggtttggctgcccagctggtgcctttgattagtatgcttgttgctcggctggttcctgtgatcacccagattattggtgcggtgacacaggttgctgccatgttgttgcctgcgttgatgccggtgttgcaggctgttgtggctgtgatacggcaggttgttggcgtgatcatgcagttggtgcctgttttgatgcctgttattcagcagattttgggtgctgtcatgtctgttctgccgccgattattggcctgattcggtcgctgataccagtcatcatgtcgattatgcgtgtggtggttcaggttgttgcggttgttatacaggtggtggcccgtattcttgcggttgtggctccgatggtggcggctgtggtagggtttgttgcccgtattgttggtgctgtcgtgtcggctgtggcccgtgttattgccactgttgcccgtgttatcgggtggcttgtggctaattttgtgtctggtttggcacgtatgggttcggttattcaggctggctggaatcgtattaggtcgtttacgtctgcgtttatgggcggtttcaagtcgatcatttctgccggtgtggccgcggttgtcgggttttttgcccggcttggtttgtcggttgcctcccatgtgaggtctggttttaacgcagcccgtggcgctgtttcttccgctatgaacgggatacgtagtgtggtgtcttcggtggcgtctgctgttggcgggtttttcagttcgatggcgtctagggttcgtggtgctgcctcgtccgggtttaatggtgcccggagtgcggcatcgtctgctatgcatgctatgggctcggctgtgtctagtggtgttcatagtgtgctagggttttttcggaatctgcctggcaatattaggggcgccttgggtagtatgggctccttgttggtgtctgctggccgtgatgtggtggccggtttgggtaatggtatccggaatgctatgagtggcctgttggatacggtgcgtaacatgggttctcaggttgctaatgctgctaaatcggtgttgggtattcattccccgtctagggtgtttcgtgaccaggttggccgtcaggttgttgccggtttggctgaggggatcaccgggaatgcgggtttggcgttggatgcgatgtcgggtgttgctggtcggcttccggatgcggttgatgcccggtttggtgtgcgatcgtctgtgggctcgtttacgccttacgaccggtatcagcgtgcgaacgataagagtgttgtggtgaatgtgaatgggcctacttatggggatccgaacgagtttgcgaagcggattgagcggcagcagcgtgacgctttgaacgcgttggcttacgtgtgattgggggtgttgtgtatgtttattcctgacccgtctgatcgtgccggtttgactgttacctggtctatggatccgctgtttggtgtggagcgtgtgcttcatttgacggattatacgggtgcgtctcctgtcatgttgttgaatgattcgttgcgcggtttgggtgttcccgaggtggagcatttttctcaaactcatgttggggtgcacggctcggagtggcgcgggtttaatgtgaagcctcgcgaggtgacgctgccggtgttggtgtcgggtgttgacccggatccggtgggcgggtttcgtgacggttttttgaaggcctatgacgagttgtggtctgcttttccttcgggcgaggagggggagttgtcggtgaagactcctgccggtgttgagcgtgtgttgaagtgtcggtttgattcggtggatgacacgtttacggttgatccggtgaatcgtggctatgcgcgttatctgttgcatttgacggcttatgacccgttttggtatggggatgagcaaaagtttcgttttagtaacgcgaagttgcaggattggttgggtggcggccctgtcggcaagaagggtacagcgtttcctgtggtgttgacgcctggtgttggttcgggttgggataacctgtccaataagggtgatgtgcctgcgtggcctgtgattcgtgttgagggcccgttggagtcgtggtctgtgcagattgatggtttgcgtgtgtcttctgattatcctgtcgaggagtatgattggatcactattgatacggatcctcgccggcagtctgctttgttgaacgggtttgaggatgtgatggatcgtttgacagagtgggagtttgcgcctatcccgcctggcggttctaagagtgtgaatattgagatggttggtttgggtgccattgttgtgtcggtgcagtacaggtttttgagggcttggtgaatagttgatggctggtcttgttccgcagataacattgtttacaccggattatcaccgtgtggcgcctatcaatttttttgagtcgttgaaactgtcgttgaagtggaatggtttgtcgacgctggagttggtggtgtcgggggatcattccaggcttgacgggttgacgaagccgggggcgcggctggttgttgattatggtggcggccagattttttctgggcctgtgcgtagggttcatggtgtgggtccttggcgttcttcccatgtgactatcacatgtgaggatgatattcgcctgttgtggcgtatgttgatgtggcctgtgaattatcgtcccggtttggtgggtatggagtggcgtgccgacagggattatgcccactattcgggtgcggcggagtcggttgctaagcaggtgttgcgggataatgcttggcgttttccgcctggtttgtttatgaacgacgatgagcagcgtggccgctatattaaagattttcaggcccggttccacttgtttgccgataagttgttgccggtgttgtcgtgggctcgtatgactgtcacggtgaaccagtttgagaatgcgaagtttgatcagcgtggtttgctgtttgattgtgtgcctgctgtgacgcgtagccatgtgttgactgccgagtctggttcgattgtgtcgtgggagtatgtgcgtgacgccccgaaggctacttcggtggtggttggtggccgcggcgagggcaaggacaggctgttttgcgaggatgttgattcggcggccgaggatgactggtttgatcgtgtcgaggtgtttaaggatgcccgtaacacggattccgagaaggtgcatctcatcgatgaggctgagcaggtgttgtccgagtcgggggccacgtcggggtttaagattgagttggctgagtcggatgtgttgcggtttgggcctggccgcctgatgccgggtgatttgatctatgtggatgtgggttctggtcctattgcggagattgttcggcagattgatgtggagtgtgtatcgcctggtgatggttggacgaaggtgactccggttgcgggggattatgaggataatccgtcggcgttgttggctcgccgtgtggctggtttggctgcgggtgtgcgggatttgcaaaaattctagaaaagattaggggtttgttgtgggtattgtgtgtaaagggtttgatggtgtgttgaccgagtatgattgggctcaaatgtctggtctgatgggtaatatgccttcggttaaggggccggacgattttcgtgtcggcacaacgatccagggtgccacagtgttgtgtgaggttctgccggggcaggcttgggctcacggggtgatgtgcacgtcgaatggtgttgagacggtgacagggcagctgcctggcccgggtgagactcgatacgactatgttgtcctgtctcgggattgggagcagaacacggccaagttggagattgttcctggggggcgtgcggagcgtgcccgggatgtgttgcgtgcggagcctggcgtgtatcatcagcagctactggcgacgttggtggtgtcgtctaacgggttgcagcagcagctggataggcgtgctatagcggctcgtgtggcgtttggcgagtctgctgcgtgtgatcctacccctgtggagggtgaccgtgtgatggttccttcgggggctgtgtgggctaaccataacggtgagtggctgcagttgtctccgcgtattgagacgggttcgaagtcgatcatgtttggcggatcgagtgtatatgcttacacgatccagtttggtcgccagtttagtagtccgcctgtcgtggtggcgtctatgggcaccgcggcggggggtacgcagcagattgatgtgaaagcctacaatattactacgagtaagtttgatttggcgtttattacgaatgatggttcgaagccgaatggtgcgcctgcggtggctaattggattgctgtcggcgtgtgactgcacgggtgttatggcggatggtgtgatgttggggggctgtggtgtcgtggtttactcctgcactggtggcctctatctgtaccgcgttggccacggttttgggttcggttcaggctgtcacatcccggtctaggaagcgtttacgcaggctgtctgcgcaggtggatgcgatggaagagtatacgtggggtgtgcggcgcgaggtgcgaaggtttaacgccgggcttcctgacgatgtggagccgatgcatcttcctgatttgcccgagtttttgaaagatactgttgatggtggaggtgagtagggttgagggagttggaggaggagaagcggcagcgccgcaattttgagaaggcttcactggtgttgttgtttttgtcgcttgtgctattggcggtggttgctgcgggtgctttgcgtttcggatcggtgtcttctgagcgggattcggagcaggctaaagcccagtctaatggttcggctgctaagggtttggctgcccgtgtgaggcaggtgtgtgcttctggcgggcaggagtctgtgcggcttcaccagtctggcttgtgtgtggatgctcagcgtgttgagcggagtgtgcagggtgtgccgggtccggctggtgtgcgtggcccgcaggggccgcaggggccgcaggggccggctggtgttgatggttctgctgggctggttggccctgttggtcctcagggttcccctggtttgaatggtgtgaagggtcctgacggtttgcctggcgcgaatggatcagatggccatgatggtgttccgggccgtgcaggcgtggacggtgtgaatggagttgatggcgctgatggtcgggatggtgttaatggttcggccggtgagcgcggtgatgtgggcccttcaggtcctgccggcccgcaaggtgcacagggtgaacgtggtgagcgcggccccgccggtgcgaacggatccgatggtaaagacggtaaggatgggcgctcggtggtgtccgtgtactgttctgagggccgcctgtttgtgaaatatagtgatggtgtggcttctactatatcgggttcggttgcctgccagaaggtgaaaccgtctcctgtggttaccgtgtcatcccacaaataaaagatagaaaaggagtgacttatgtcgatggtgtttgggggtggtgtgtggtgagatacattcctgcggcgcatcactcggccggttctaatagtccggtgaaccgggttgtgattcatgcgacatgcccggatgtggggtttccgtccgcttcccgtaaagggcgggcggtgtctacagcaaactattttgcttccccatcgtctggtggttcggcgcattacgtgtgtgatattggggagacggtgcagtgcctgtccgagtctacgattggttggcatgccccgccgaatccgcatagtttgggtatagagatttgcgcggatggcggctcgcacgcctcattccgtgttccagggcatgcttacactcgtgagcagtggcttgaccctcgggtgtggcccgcggtagagaaggctgccatcctgtgtagacgtttgtgtgacaagcatggtgttccgaaaaggaaactgtctgtggccgatttgaaggccggtaaacgtggtgtttgcgggcatgtggatgtgacggatgcgtggcatcagtcggatcatgacgatccggggccgtggtttccgtgggacaggtttatggccgtcgtcaacggcggcagtggagatagtggggagttaacggtggctgatgtgaaagccttgcatgatcagattaaacaattgtctgctcagcttactggttcggtgaataagctgcatcatgatgttggtgtggttcaggttcagaatggtgatttgggtaagcgtgttgatgccctgtcgtgggtgaagaatccggtgacggggaagctgtggcgcaccaaggatgccctgtggagtgtctggtattacgtgttggagtgtcgtagccgtattgacaggctggagtctgctgtcaacgatttaaagaagtgatgtgttgtgggtaaacagttttggttgggtttgtttgagcgtgccctgaaaacttttattcaaacgtttgttgctgtgcttggggtgactgcgggtgtgacttatactgcggagtcgtttcgtggtttgccgtgggagtctgccctgattacggccggggttgctgcggtgttgtcggtggctacctcgtttggtaatccgtcgtttgttgccggtaaaccgaaaacgacgcctgttgtggatgctgggcttgttccaccggatgatcctggaatagtggagtctcacatggttgacgaaacggatcctggcatgatagagcctatcgacgatgccgatgctggaggctatgtgccgaggcgtgctgctgagtcggaagttggcacggtagagtctactgttgcataagtgaatatatgtgtgtgccccagcggtgctgccacgatcgtgtggtggttgctgctggggcactatttttgtgtctataggggttttacaggttgtcgtctagggtgtcttcgagtgtctgttgtaggagtgcacactcggcgagggtgtcttcagcctggtcgacaatgttttgttttgctatgcctggatagttgtcgcggtgattgtagatggcttccagaatgttgtctgccatgatttgtagtgttagggcctggttggtgatgcattccagctcgtctagggcggcctggctagcctccggctgccggttgtccggatgttctgcaaggttgcagtcccacaggatttcttggcatgcatccctggtgtctgcgtccacatcgatgtcgtctaggctgacaccgttggcgttgaggctgatgttgtcgaggttgatgggaaccagatattcgctgctgatgctgcaggtgatgtttgcgagttctgtcatgtttcgtggctgctgctgtatgatgcggcgggccgcggttttgagggctgtgactgttcggtgtctgttactgggcatcgtttctattcttcttccccggtgtagctggtggtgttggtgtactgggtgagtgtgatcaggcactggtcggcccactgtttcaccgtctgccgtgtcacacccaatcgttgggctgccaccgaataggtttgatcatacccgtagacttccctgaatgcggcaagccgtgctagccgtttccgctgtttggatggttcacaggcgagggtgtagtcgtcgatggccagttgtagatcgatcatggtgacaatgttgttgccgtggtgttgtggcgcggttggtgggggtggcattcctggctccacggagggtttccatggtccgccgttccagatccattgtgcggcttgaatgatgtcggcggtggtgtaggttcggttcactggtcatcccctgaacatgttgtcgaggttgtctgggttgctggtgtcgaatcgtccgacgcagtggcagtagtcgtacatgagtttaataatgtgttggtggtctcccaaataggtgtttccgctgatgctgtaggtggctgtgccgtctttcgcgatggtgtatttggcggtgatggtttcggggttttcggtgtcggtgatgatggctgtggtggtggtgcctactgtttggagtatggtggtttgggttccgtcgtcgatggtggttttaaccatggtgtgttttttccctttcagttgcttgtttggttgtcggctagatgaatgatgtcgggtaagggtttcggctggtcgaggtgttgtatggttttgttggctagccgtttggctaccctgtaacacattttggtgtagtgtttgttgtctaggttgtggtattgttcccgcaccgcaatatatagtagggagtcttggtacaggtcgtctgcactgattgcggggtagtgtgcggctgttttggtgcatgcccggttgagtgtgcgtagatgatggtctgtggcccacacccacgatgcggtggtggccaggtctgcttttgttggtcgtctgctcatggcatctctttcatcgggctatctggtagttgtttggtgttttgttgttgatagtgtagcacacgagtccggggtttccggtggtgcccgtcttgtgccgataccatgtggattcgccttccatggatgggcattggatgaaggttcgtgtgccttgctctgagatttcgaggtggtgccggtggcctgccatgagaatattagatacggtgccgttgtggaattcctgtccgcgccaccattcgtagtgttggttgttgcgccattggtgtccgtgggcgtggaggatccgtgtgccggctacttcgactgtggtggtcatttcgtcccggctggggaagtggaagtgtaggttggggtattggttggtgagttggtaggcttctgcgatggcgcggcagcagtccacgtcgaaggagtcgtcgtaggtggtgactcctttaccgaagcgcacggcttctccgtggttgccggggatggatgtgacggtgacatcagcgcagtggtcgaacatgtgtatgagttgcatcatggccatgcgggtgagcctgatttgttccgtcaagggtgtttgtgtgcgccaggcgttgttgccgccttgtgacacgtatccttcgatcatgtcgccgaggaaggcgatgtggactcgttgcggtttgcctgcctgttgccagtagtgtttggcggctgccagggagtgtaggtagtcgtcggcgaagtgtgctgtttctcctccggggatgcctttgccgatttggaagtctcctgcccctatgacgaaggctgcggtgctgtagtcggtgcgggtgtcctgttcgggttttgggggtgtccattcggctaatttatcgacgagttcgtctacagggtaggggtttgttgcgggttggtggtcgattattttttgtacggatcggcctgtttctccgttcggtaaggtccattcggagatgcgtgtgcggcgtacggtgccgttggctagattgtcgtcgatggtgtcgatggcgttgtcgtggttggctagctgtgtgagtagccggtctatgttgtctatcaccggttttcctcttcctcgtgtgtggtggtggcttgtttgcggcggtagtctttaataacggtggcggagatggggtatccggcttgggtgagttgttttgctagccatgaggcggggatagacctgtcggcgagcacgtctgcggctttgcggccgtatcgttggatcaacgtttcagttttggttgccatggtgtcctatcggttgtgtggtgggctgccatcctgtgcggcagtcgccgtcatgtcccggtttgcgtgtgcaccacgtgatggttccgtctgtgtggttgagtgttttgccgcacatgacgttttggagatgctctggcagctggtcggtgttgttattgtcttgctcgtcgagcagggttttttggttggtgaaatgctcggacacggtgccgttgtggactgggagtatccatgttttccattgttgttgcatccgggtgttccagtggaattgtttggccgcgttttctgcttgttttaaggttttgtagtagcctacaatgattcgctggtggttgttgtctggctggtgtggccctcgccagtattgtgccgctacagcgtacctgttgttgtctgtgaaggcgtcccagcagtactcgatgatgtgttgcagcacattatcgggaatgtcttgtgcttggttttcgtcgagccactcgtcgacaatgatgttgtgtatggcgcgtttgtctttggtggtgggtttgaacgagatgctcacagtacgggcctgtcgtcttgcatgaaatcattgaaggatgattcgcttgcgcgtctggcttgtgtgatttgctggtcggtccagtcggggtgttgctgtttcagatagtgccagcggcaggcatcatatgtttcgttctgcaagcgggtgagatggttttcggtgatgatttgtttccacattgtccacgagacgtcgagcctgcggagcatgtccatggccggcacattaaacgagtcaaggaagagtatttcgtgggtgtagtagtttttctcgtaggcgtcccatccgcttcggtgtctgttgggctggtttttggggtaggcttcccggcatactttgtgtaaacgtttggccatgtcgtcgggtagtttaatgtcggggttggcgcggatcatggatcgcatcccgtcgtaggtggtgccccaggtgtgcatgatgtgtagtgggctgtctccatcagcccatttttctgcacagatggcgaggcggatgcgcctccgggcggctttgctggtgttgcgccggctggggattgggcacgtgtcgaggggatccatggtgttttagtgtacctttctggtttagtgttgttgacaggttttactgtagcacagtgtctagtgcttgtgtcaaccctgttttgccggcctgaaggtaggtgtctgtgacatccccgacagtgaggggcgcatgggtggcttgggggagtgccgcctggatggtttgtgccatctgttcgcctgccgggtctgggtcggaccagatgtagatgtggtcgtagccttcaaaaaatttggtccaaaaggtttgccacgaggtggctcctggtagtgctacagctggccatccgcattgttcgaggatcatggagtcgaattcgccttcgcaaatgtgcatgtcggtttgcgggttggccatggcggccatgttgtagatggagcctgtgtccccggccggggtcaaatatttggggtggttgtgggttttgcagtcgtgcgggagtgagcagcggaaacgcatttttcgtatttcggctgggccgccccaggtggggtacatgtatgggatggtgatgcactggttgtagttttcgtggcctgggatggggtcattgtcgatgtatccaaggtggtggtagcgggctgtttcttcgctgatgcctcttgccgagaggaggtcgagtatgttttcgaggtgggtttcgtagagggccgaggctttctggattcggcggcgttccgcaatgttgtaggggcgtatgctgtcgtacattcgggttttctttctctagtcgttgttgtagcttgtggagtccgcctccgataccgcatgtgtggcagtaccagacgcccttgtcgaggttgatgctcatggagggctggtggtcgtcgtggaacgggcagaggatgtgttgctcgtttttggacggattgtagcgtatctggtaggtgtcgaggaggcggcaggtgtcagaggtgtgggaggagctcgttgagggttgataccacataggcttcgctccatggcttgttgcgctgtttcatcactacgagtccgatggtggaattgttttgtttgtttcggtgggtttcgtagttgcgtgcctcccggctggcttgtttcacgaattcggcgagatggggctggccagctttcgcttcgatcacataggtgtggttgccggttgtgaggatgaggtcgccttcgtcctctttaccgttgaggtggaggcgttcgatattgtggccggtgtcgcgtagctggtgcaataatcgtgtttcccattcggcgccggccctgcggttgcgtgcctgctgtgtggccatcatagtcctttgtgtgttgtggtcatgttccagggctgtttttcggcgagtggcccgaagaatgtgtattctgggtatgccctgagccgctcatattttgttccgtctgggctggatttgccggtgcgctgtttcaacactgcgatgcgagcctctgccggtatcgatagcccgttgccattatcctcgccaccatacaatgagactccgaggatgagttgtggtttttcggagagtccgtttttgatttccctccgtgccggggggtgttcgatgtcggagccggttttgtcggtggcgtggtgtgtgacaataatggtggagccagtgtcgcggcctaaggctgtgatccattgcatggcttcttgctgtgcctggtagtctgattcgcagtcttggatgtccatcaggttgtcgataacaatgatgggtgggaaagtgttccacatttccatgtaggcttgcagttccatggtgatgtctgtccatgtgatgggtgactggaatgagaaggtgatgtgcgcgccgtggtggatgctgtctcgatagtattctggcccgtagtcgtcgatgttttgttgtatttgggcggtggtgtgttgggtgttgagtgagatgattcgtgtggaggcctcccagggtgtcatgtcccctgatatgtagagggctggctggttgagcatcgcggtgatgaacatggctagcccggatttttggctgccggaccgccccgcgatcatgaccaaatcccctttgtggatgtgcatgtcctggtttcggtagaggggttctagctggggtatgcggggcagttcggcggctgtttgggaggccctctcgaaggatctttggagagagagcatcggagccttaatctatctattggttgggtgtgttttggtggtcagatggagtcgatatcgatatcagcattagcgggggctgtggtgtcgtctagctggccgttatcgcgcttgtctacgtattcggcaaccttatcgtagatggcgtcgtcgaggggtttgagcacgaccgcgttgaacccgtttttggtgcgcacggtggcgagtttgaaggcctgctcttcgccgagatatgcttcgaggtcgcggatcatggagtgtgggcggtcgttgttgccgcgcgctttttcgatgatggcgttggggatggtttctggggtgccgttgttgagatcctggaaggtgtggaagatggtgacatcagcgtagatgcggtctgctgtctgtccgccgtagccttcagtgttgtgctgaacgtcgcggactttgaaggcgatggcggtggcgtcctggtttcgggaggggttgaagaaggtgctgctgctgttgcggtagttggcgagtcccattgttgtttcctttactgttttgttggtttgtgttggctggtattggtttatcgggtgaggctgtttcgtttgctgcggaacgcctcagacacgtcactgttactggtgatgatctttttgtactgtttgagaaggtctgctagctgtgctttgctggtggctttgttgatccggtcgataataatctcgttttcctggttggcgatcttgttgacgtagtctttggcggctttatcgtatcggtcttgaagcaggattgctgcgctagcgatgagggttgcgaggtcccagtctttggatacggtttcgtctttcaatcctcctagcagatcaataatggattgtttgatgtcttctgcggtgtctccgcggatgacggcccatggggcagcatagtctccaccatatttgagtgtgatagttagctttccgctgtctgtggtgtgctcgtcggtcacgtgttttccttttctttcttgtctgtttggggtggctgtacggtggtttctatcgggtatctgtaggcgtttttcccgttgacagcccagcaggcgtccctgacggggcatcctttacagagtgctgtgacgtggggtacgaagatgccttgactgattcctttcattgcttgactgtacatggatgatacatgccggtaggtgttgttgtcaaggtcgtagagttcggttgctgtgccctgctcgactgattgctcgtctcccttggtggtggcgggtgtccaaaacatgcctttcgtcacatggatgccgtgttgttctagcatgtacctgtatgtgtgcagctgcatactgtcggctggtaggcgtcctgttttgaggtccaaaatgaaggtttcacccgtattcgtgtctgtgaatacccggtcgatgtagccgacaatctgggtgccgtcttggagggtggtttctaccgggtattcgatgcctggctggccgtcaataacagcggtgatgtattctgggtggttgcgcctccatgttttccaccggtccacaaaggtgtggccgtagaccatccaccagtcgtagtctttcttgtgtggcccgcccgactcgcacatgtttttgcatattctgccggagggtttgatttctgtgccttcggattcggcgagggctacttgtgtggcgaaaatgtttgtgaaagatgagagtttgtctggcagtgcagggtattcggcgggattgtacaggtgtaggtcgtattgttcggtgatgtggtgtatggcgcttccggcgatggtggcgtaccaggtgtggtgttgggtgtggtagccgtgggataggcgccatttttctccgcattcggcccactgggtgagtgaactgtaggagatgtggcctggatggtggatggttttcggatattgtgctagaggcattacttgtcgcttttattccatgggttgcgggtgtcttggccggcctggtgttgctggtaggcgaggagtgcgaggcagtgccaggcagcatgggccagatggggtagcccggattcataatcgaggttgttgccttgctgccatgatagtaggtgcctgtagagggcgtcgacgctgtggctccacgggtagccgccggtccagttgttgtcgccatatttggtggcgccgtatccggccacagagcctagggcgtgaagggatgctgggtcgatgagggagagtctgcaaagtttcaattcttttcgggcaccagtatcagggtcggtgtacatgctggtgggctcatccatggggtgtgtgctccttacgtgtggggttactggttggggttgtgggctagggcgacggcgagaataatgatggcgagggtttcagcgatgaggatgggtgctgtgatcatttggtgtttcggggattgttggtgagtgtggaggcgcctagcaggatggctagcgcacagacggctgtgatggcgagggctgccttgtggccggtgccggttgcgtacatccatgtgatgatggcgccttggatccatgccagtgcggtgaagaacgtttcgtagctgtgcagctcaatgttattgttgggtgtgttcatgcttgctcctgaagaatggtgttgatggttttataaatgttgtacaggtctgtttcgatagataacagttggttgatttggtggtcgagattaatgtttgggttgagggtgttgatgcgggaggcgatatcggtggctgtgcgtagtgtgccgccggtgtggtgaataatgtgtgccgtgtcggcgagtccggtggtgacagcgtagtgggataggagaggcatgactgggggatgctccttggcgggttactgttgcgggttgatgttgaggtcggtgacgtgcgggtgttcttctgttcctgtgacgaggcagtggacggtgactgggagtttggatgcgccgggctgtttcatggttgcgccgtagacgatgctgaatgtgtctttaccaataattttgtggagttggaggtcgatgtcggggttgccgttccagttgacaccgtgtgcggcggcctgttgttcggctttgcggttgcaggtgtgtgctgccgtgatcatggtgagaccttgtgaggtttcttcaccccttgcttgggcttgctggtgggctttggcctgctcggctcgcagtgactgttctgcggctgcctgccgtgccgctttctcggctttgcgctgctgagcggtttcaggtgtccaggtggtgttggctgtggtggcttggggtgcgggttgtgaggcgagtggcggattgtcgtctggggctggcatgaatgagacggcggcaatgatggcggctgtgattccggcgatggtgtagccgtttttcttgttcatgttttgtgtcccctttccggggtgttgttcgttgctgacatgattaatcatggtgtgggcggtggcctgtgtcaaggctgcgctcaacgattgtgagcgatccttgtatggctaggtgttttatcgggcgcacagggtgagtagatggccaacattgatgcggctcacattccagtagagttgtgtggcttcaccgccggtgagtggcttccactcgttgtggctgaacacggtgccatcggatgctatgaatatgtcggggcgtagcttgtggagttcaatctctacgctctgccggtaggcttcggcgaggccctcaaaatccatgtggttgcaggagaggttttcgaggcgtgtcaggtcgaagggtgtggggcagtcgtagctggcgggggtgtagagctgggtgaagtggttggcgatcttctgcatcatgattccttttctggtgatggtgtgttgatggttttatcgtgtggattcggcgatgatggcatccacatcgattgtgtcgatcatgtcgtggaggtcttcggcctcatccacggtgagtggctgccaatcctggggtccgtatatggcaccgtcgagagtgatggtccacaggggccggatgagtcgtacggcttcttcgactttggcacggtataggcggcagatgatagacgtgtgggtgttacctatgtcacatcctgccaggtgtgcggggtggagtgggttgatttctgtctgcccgtagaggctggtgaaggatggtgtgatgagtgtgccatccatgggtgatgttcctttctggactgtctgggttggttgttgtggtttctagagtgtgtaggttgcaaccgggagtcaaggctgcactcattcggattgagcgtttcatggagggtgtgtcaggtgtgacagatgtcactgaagcctttattgcctctctcagcgcctgaaatcttctgggggtaggattatatagggttgaccctggtagtcgattctagaccccatacagggcgtctcaggggtatgtctgggtgatggcgggtatggcaggtgatctagcgggtcgagataggcctgcatcgcaaaggtcgaggttccagatctgggcatggaatctacaccctcatactgtgtgagatgtatcacatcctcctggcttggtgtgtactctcgagactactctgccgatctgacatggagggtgtagcccagaaataccatttaaagccttcacacggcgcctaggagcgccttacagggtgggggctatgtatttatacccccagcacattctgatcgattctagacgcccccaaaagcctgatacacgatcaaccatttcggcatagatcatcagcccctatcctgcttagctaagcctcaactatgtggacagtgttggatgctaagagggaagaaggacacggtaaaaagaagagggggagcatcagccttcacacctgaggtacttaagttcacattaaagtcttagcactcagtacttagcaccgagcccctcaagggctcggcatcagcccaaacaggctcagccgatcaggcacagcactgaaaagggtacacgccatcagggaaggcttgagagtacgaggagcctcagcgacgcgtactcgaaagcctgagggaacacccatcagcactgatgggcctagcgtgttcggaaaggacacaggagtgaagtgtgacagctgtccgggagtgaaacctgttctggctaggggtttcagccttaaccaccctcaaaggttacaagactctaagaaaatttaagaaaactcttaggaagaaagttgtgttcatatccccctaaaaacacccaaaatagccctcaaacccgcctatagagccaaacagtcaagtttgactcgtctagacggcgtatgctaggctggacaggtagccagctggacgcaaggccagaaagtgctgacgcacttcccgacctcgcttaccatcagtctaccaaacactttaaagcttcaaggctaagcgctaagcctttaagaccttaacgcttagcaccgagcccctcaagggctcggcatcagccttaaagttttaaacactttaagtaactataaagctttaaaccttaacacctaagttaagtataaaaccttaaaggcttagcacttaaggatataaactttacatcagtgtttaagactttaaaacttaaagtaactataagactttaaagaccttaagtacttaaagttaatcatcagtcttaaactttaatattataacctataagtcttaaagcttataggtataataatataatataagttataaaagttttagaagagctaaagggttaacttctttacttctcttctctctttggttctttctctcttctcttcttttcttcatcaggggagaagaggaacctttaccgtcaacgctgatggacttttcgccgtgtgactcgtgtaccaccggtcgcacgctcccggttgcacactcaccacacttactctacccgtgtccctttcaggcttggcgtgttcggctgaaggcgtacggcgtgtcacgctaaaacccttaacactaggtaagacttaaagtgtatattatatgtagaagactttaaaaaacctataaggtattcctgcttagcccgtgtcctactctgctaggcgccaagcgctaagccttgaaacgcgaacacccatccacccccatttttcttccgtgtccttcttcttttgacaccgctggggggcgatgtgatctttctcacatgccaggggatgtgagggaaaacaaacaccccggcacaaacagaacaccccctcaaacgaacaaaacagccctcagaatcgatgagcagggcaagggcaaggtattcatacccccaacggttcccaggctgttacaggagcaatgagagcccatagaggcgtggtagacgataggggagcgttatggcacacaccaaccgcaccgcatccgcctcacaccgacgctggcgggctcgactcataacccaggccagacagcaaggccaaaccgaatgcccactctgcggagcaaccatcacctgggacacacaccagctaccaaccagccccgaagccgaccacatcacacccgtcagccggggaggactcaacaccctcgacaatgggcaaatcatctgcagaacatgcaacagaagcaaaggtaatcgcagcgaaccaaacatcacattccaacaacaaaccacaaaaacattgattccatggtgaaaaacccgccaacccccaccggggacaccccctgcacacccgtgcaagacc

SEQ ID NO: 43 - DNA, 29453 bp, Bacteriophage of P. acnes
agtgaaatacctcccttttgtggatttatctgtttgtcgactttttgtgttggtggtgagtgttgtgcagcctgagcttcctgggtctcgtgattggtgtggggagacgcttcgctggtggcgtgtgtggggtgaggatagtcgcgcatcgtacgtgtcggatgaggagtggctgtttctcatggatgctgcggtgattcatgattgtgtgtggcgtgagggccgggctgaccttgtggcttcgcttcgtgctcatgtgaaggcttttatgggcatgttggatcgttattcggttgatgtggcgtctggtggccgtggtgggggttctgcggtggcgatgattgaccggtatcggaagcgcaagggggcctgattaggtgtctggtgttgttgggtctcaggtgcctcgtcaccgtgtggctgcggcgtattcggtgactgccggcggggatgctggggaattgggtcgtgcgtatgggttgatgcctgatccgtggcagcagcaggtgttggatgattggcttgctgtcggtggtaatggcaggcttgcttctggtgtgtgtggggtgtttgttccgcggcagaatggcaagaatgctattttggagattgtggagttgtttaaggcgactattcagggtcgccgtattttgcatacggctcacgagttgaagtcggctcgtaaggcgtttatgcgtttgaggtcgttttttgagaatgagcggcagtttcctgacttgtatcgtatggtgaagtcgattcgtgcgacgaatggtcaggaggctattgtgttgcatcatccggattgtgccacgtttgagcgtaagtgtggctgtccgggttggggttcggttgagtttgtggcccgttctcgtggttctgctcgcgggtttacggttgatgatttggtgtgtgatgaggctcaggagttgtcggatgagcagttggaggctttgcttcctaccgtgagcgctgcaccgtctggtgatcctcagcagattttccttggtaccccgccggggcctttggctgacggtagcgtggtgttgcgtcttcgcgggcaggctttgtcgggtggtaaaaggattgcgtggacggagttttcgattcctgacgagacggttccggatgatctatcgaggtcgtggcggaagttggctggggatacgaatcctgcgctgggtcgccgcctgaatttcgggacggtgagcgatgagcatgagtcgatgtcggctgccgggtttgctcgggagaggcttggctggtgggatcgtggccagtcggctacgtctgtgataccggccgataagtgggctcagtctgctgtggatgaggcgagtctggttggcgggaaagtgtttggtatctctttttcgcgatcaggcaatagggttgctttggctggtgccggcaggactgatgctggtgttcatgttgaggttattgatggcctgtcggggacgattgtggatggtgtaggccagctggctgactggttggcgttgcgttggggtgacacggaaaagatcatggttgccggttcgggtgctgtgttgttgcagaaggctttgactgatcgtggtgttccgggtcggggtgttgtggttgccgatactggggtgtatgtggaggcgtgtcaagcctttctggaaggcgtaaggtctgggagtgtttctcatcctcgtgctgattctcgccgtgacatgttggatattgctgtaaggtcggcggttcagaaacataaaggctctgcgtggggttggggttccacatttaaggacggttctgaggttcctttggaggctgtgtcgctggcgtattttggtgcgaaaacagttaaagcgaagcggcgtgagcgtagtggtaggaagcgggtgtctgtggtatgaactcggatgagttggctctgattgagggcatgtttgatcgtattaagagtttgtcttcgtggcattgtcgcattgagggctactatgagggttctagccgggtgcgtgatttgggggtagctattcccccggagttgcagcgtgtgcagactgtggtgtcgtggcctgggattgcggtggatgctttggaggagcgtctggattggctgggctggactaatggtgacggctacggcctggatggtgtgtatgctgcgaatcggcttgctacggcgtcgtgtgatgtgcatttggatgcgctgatttttggtttgtcgtttgtggctatcattcctcatggtgatggttcggtgtcggttcgtccgcagtcaccaaagaattgtactggccggttttctgccgatgggtctcgtctggatgctggccttgtggtgcagcagacgtgtgatcctgaggttgttgaggcggagttgttgcttcctgatgtgattgttcaggttgagcggcggggttcgcgtgaatgggttgaggtggatcgtataccgaatgtgttgggtgctgttccgcttgtgcctattgtgaatcgtcgccgtacttctaggattgatggccgttcggagattacgaggtctattagggcttacacggatgaggctgtgcgcacactgttggggcagtctgtgaatcgtgatttttatgcgtatcctcagcgttgggtgactggcgtgagcgcggatgagttttcgcagcctggctgggtcctgtcgatggcttctgtgtgggctgtcgataaggatgatgatggggacactccgaatgtggggtcgtttcctgtcaattcgcctacaccgtattcggatcagatgagactgttggcgcagttgacggctggtgaggcggctgttccggaacgctatttcgggtttatcacgtctaacccgcctagtggggaggctttggcggccgaggaatctcggcttgtgaagcgtgctgagcggcgccaaacgtcgtttggtcagggctggctgtcggttggtttcctggctgccaagtcgcttgattcttccgttaacgaagctgatttttttggtgatgttggtttgcgttggcgtgatgcatcaacacctactcgggcggctacagcggatgctgtgacgaagctggttggtgccggtattttgcctgctgattctcgcacggtgttggagatgctggggcttgatgatgtgcaggttgaggctgtgatgcggcatcgcgccgaatctgcggatccgttggctgcgcttgctggggctatttcccgtcaaacgaacgaggtttgatggatggcttcgggtgctatgtcgaggctggctgcgactgagtatcagcgtgaggcggtcaggtttgctgggaagtatgcgggctattattctgagcttggccgtttgtggcgtgccggcaggatgagtgacacacagtatgttcgtttgtgtgtggagttggagcgtgccggccatgatggttcggcgtcgttggccgccaggtttgtgtcggattttcggaagcttaacggtgtcgatcctggtttgattgtgtatgacgagtttgatgctgccgcggctttggctaggtcgttttcgactatgaagattatgaatagtgacccggatcgggcgaatgatacgattgatgcgatggcggcgggttttgatcgggctgtcatgaatgctggtcgtgacacggttgagtggtctgcgggtgcgcagggtaggtcgtggcgtcgtgtcacggatggggatccgtgtgctttttgtgccatgttggctacgaggtcggattatacgactaaggaaagggcgctcactactggtcatacgcggcgtcataagcgtggtggtaagcgtccgtttggttcgaagtatcatgatcattgtgggtgtacggtggttgaggttgttggcccttgggaaccgaatagggctgatgccgagtatcagaggacgtatgagaaggctcgcgagtgggttgatgatcatgggttgcagcagtcgcctggcaatattttgaaggctatgcgtactgttggtggcatgagataatttgatgtggtttccggttgtgcgccgccggttatcggtgcacagggttgtctcccgcacgggggtcaacaatgttgtgttgttttccgcaaggagtgtagggttaggctatggccgatcagagtgttgaggaacagaatgttgacaatgatgttgtggagtccggaaagggtgacggcattgttgacacggtgaagggcgatcaaggcaaacaggttgaagatcagtcgaagaatgaaggcgagggtaaatcgccggggactgattggaaggctgaggctcgtaaatgggagtctcgtgcgaaaagtaatttttccgagctggagaagcttcgtacatcgagtgacgattctggatctactattgatgagcttcgccgcaagaatgaggaactcgaagacaggatcaacgggtttgttcttgagggtgtgaagcgtgatgtggctgccgagtgtggcctttcgggtgatgctgtcgcttttctgcacggcgacgatcgtgaagcgctggtggagtctgctaaggctttgaagggtttgatcgaccatagtagtggtggcgcgggtgtgcgccgtcttgcggggagtgcccccgttgatgatgttaaacgacgtgagggtgtcgcgtttgtggatgctcttgtcaataattctaggagatgatttgtgatggctgacgattttctttctgcagggaagcttgagcttcctggttctatgattggtgcggttcgtgaccgtgctatcgattctggtgttttggcgaagctgtcgccggagcagccgactatttttggccctgtgaagggtgccgtgtttagtggtgttcctcgcgctaagattgttggtgagggtgaggttaagccttccgcgtctgttgatgtttcggcgtttactgcgcagcctatcaaggttgtgactcagcagcgtgtttcggacgagtttatgtgggctgatgctgattaccgtctgggtgttttgcaggatctgatttccccggctcttggtgcttcgattggtcgcgctgttgatctgattgctttccatggtattgatccggctacgggtaagcctgctgcggctgtgaagacttcgctggataagacgaagcatgttgttgatgccacggattctgccacgactgatctggtcaaggcggtcggcctgattgctggtgatggtttgcaggttcctaacggtgtcgccctggatccggcgttctcgtttgctctgtcgactgaggtgtatccgaaggggtctccgcttgccggtcagccgatgtatcctgccgccgggttcgctggtttggataattggcgcggcctgaatgttggtgcttcttcgactgtttcgggtgccccggagatgtcgcctgcctctggtgtgaaggctattgttggtgatttctctcgtgtccattgggggttccagcgtaacttcccgatcgagctgatcgagtatggtgacccggatcagactggccgcgaccttaagggccacaatgaggttatggttcgcgccgaggctgtcctgtatgtggctatcgagtcgcttgactcgtttgctgttgtgaaggagaaggcttccccgaagcctaatccgccggccgagaactgatttatttgttgcgataatgttcatgctgtgtgcagggggtggtgttgatgggtatcattttgaggcctgaggatattgagcctttcgccgatattcctaaagataagcttgaggcgatgattgccgatgtggaggctgttgctgtcagtgtcgccccctgtatcgctaaaccggatttcaaatacaaggatgctgctaaggctatcctacgtagggctttgctgcgctggaatgatactggtgtttctgggcaggttcagtatgagtctgcgggcccgtttgctcagactacacggtctagtactcccacgaacttgttgtggccttccgagattgccgcgttgaagaagctgtgtgagggtgatggtggggctggtaaagcgttcactatcacaccgaccatgaggagtagtgtgaatcattctgaggtgtgttccacggtgtggggtgagggttgctcgtgcgggtcgaatattaacggctacgctggccctttgtgggagatatgatatgaccagttttccttacggtgaaacggttgtgatgcttcagccgactgttcgtgtcgatgatttgggcgacaaggttgaggattggggtcatcctgtagaaaccgtgtaccataacgtggctatctatgcttccgtttcgcaggaggatgaggccgcggggcgtgattctgattatgagcattggtcgatgcttttcaagcagcctgttgtgggcgctgattatcgttgtaggtggcgtattcggggtgtggtgtgggaggctgacgggtctcctattgtgtggcatcacccaatgtctggctgggatgctggtacgcaggttaatgtgaagcgtaagaagggctgatggttgtggcacgtgatgtgaatgtgaagcttaatcttcctggtatccgtgaggtgttgaagtcttctggggtgcagggcatgttggcggagcgtggcgagcgtgtcaagcatgcggcctctgctaatgttggcggtaatgcttttgatagggcccagtatcgtgccgggttgtcgtcggaggtgcaggttcaccgtgttgaggctgtcgctaggattggcaccacctataagggtggtaagcgtattgaggcgaagcatggcacgttggctaggtcgattggggctgcgtcgtgatcgtttacggtgatccgcgaatatgggcgaaacgcgtgctcaaggatgatggctggctgtccgatataccgtgtacaggtactgtcccggatgatttcacgggtgacttgatttggttggcgttggatggtggcccgcagttgcatgttcgtgagcgtgtttttttgcgggtgaatgtgttttctgatatgccggatcgtgctatgtctttggcgcgtcgtgttgaggctgtgctggctgatggtgttgatggtgatccggtggtgttttgtaggcgttctactggtcctgatttgttggttgatggtgcacgttttgatgtgtattcgctgtttgagctggtgtgccgtcctgtcgaatccgagtaaacgtatttgttttctatattttgtttttgtttgattatttttgggggttgtgatggctgctacacgtaaagcgtctaatgttcgctctgctgttacgggtgacgtctatattggtaaagctcatgccggtgacactattgatggtgtgaagacggttcctgacggtcttaccgctttagggtatctgtctgatgacgggtttaagattaagccggagcgtaaaacggatgatttgaaggcttggcagaatgcggatgttgttcgcactgtggctacggagtcgtctatcgagatttctttccagctgatcgagtctaagaaggaggttatcgaactgttttggcagtcgaaggttactgccggagccgattcgggttcgttcgatatttctcctggtgccacgacgggtgttcatgccctgttgatggatattattgatggcgatcaggttattcgctactatttccctgaggttgagttgattgatcgtgacgagattaagggtaagaatggcgaggtgtacgggtatggtgtgacgttgaaggcgtatcctgcccagattaataagaatggtgatgcggtgtcgggtcgggggtggatgacggctttaaaagctgatactcctccgactcctcctccggccccgaagcctccgaagcctgagccggatccgaatccgccgtctaataactgatacacatagtttgagggattgttgatagatgagtgacacaggttacacgttgaagattggtgaccgtagctgggtgttggcggatgcggaggaaacggcgcaggctgttcctgcccgcgttttccgtcgtgccgccaggattgcccagtcgggggagtctgcggatttcgcccaggttgaggtgatgttttctatgttggaggctgccgccccagaggatgctgtggaggccttggaggggcttcctatggttcgtgtggccgagattttccgccagtggatggaatataagcctgaaggtaagggtgcctcgctgggggaatagtttggctccacggcctgattgatgattatcgtggggccatcgaatacgatttccgcactaaatttggtgtttctgtttatagtgttggtggcccgcagatgtgttggggtgaggctgtccggctggctggcgtgttgtgtaccgatacgtctagccagttggcggcccacctgaatggttggcagcgcccgtttgagtggtgtgagtgggctgtgctggacatgttggatcattacaggtctgctaatagtgaggggcagccggagcctgtggcgaggcctacggatgagcgtagggcccggtttacgtctgggcaggtggacgatattttggcgcgtgttcgtgccggcggcggggtgtctcgcgagattaatattatggggtgaatagtgtatgtctggtgagattgcttccgcatatgtgtcgttgtatacgaagatgcctggccttaaaagtgatgttggtaaacagctttctggggttatgcctgctgagggtcagcgttcgggtagtctttttgctaagggcatgaagttggctcttggtggcgccgcaatggtgggtgctatcaatgttgctaagaagggcctcaagtcgatttatgatgtgactattggtggcggtatagctagggcgatggctatcgatgaggctcaggctaaactgactggtttgggtcatacgtcttctgacacgtcttcgattatgaattcggctattgaggctgtgactggtacgtcgtatgcgttgggtgatgcggcttctactgctgccgcgttgtctgcttcgggtgtgcagtctggcgggcagatgacggatgtgttgaagactatcgccgatgtgtcttatatttcgggtaagtcgtttcaggatacgggcgctatttttacgtctgtgatggctcgcggtaagttgcagggcgatgacatgttgcagcttacgatggcgggtgttcctgtgctgtctttgcttgccaggcagacgggtaaaacctcggctgaggtgtcgcagatggtgtcgaaggggcagattgattttaacacgtttgcggctgcgatgaagcttggcatgggtggtgctgcgcaggcgtctggtaagacgtttgagggcgctatgaagaatgttaagggcgccttgggctatcttggtgctacggctatggccccgtttcttaacgggttgaggcagatttttgttgcgttgaatccggttattaagtcggtcacggattcggtgaagccgatgtttgctgccgtcgatgctggtattcagcgtatgatgccgtctattttggcgtggattaatcgtatgccgggcatgattacgagaatgaatgcacagatgcgcgccaaggtggagcagctgaagagcgtttttgcgagaatgcatttgcctgtcccgaaggtgaatttgggtgccatgtttgcgggtggcacagcagtgtttggtgttgtggctgcgggtgtggggaagcttgttgcagggtttgccccgttggcggtgtcgttgaagaatcttctgccgtcgtttggtgctttgaagggtgccgctggcgggcttggcggcgtgtttcgcgccctgggcggccctgtcggtattgtgatcggcttgtttgctgccatgtttgcgacgaacgcccagttccgtgccgcggtgatgcagcttgtggctgtggtgggccaggctttggggcagattatggccgctattcagcccttgtttggtttagtggccggtgttgtggcacagttggcgccagtgttcggccagattatcggtatggttgccggtttggctgcccagattgtgcctttgattagtatgcttgtcgcccggctggttcctgtgattacgcagattattggtgcggtgactcaggttgctgcaatgttgttgccggcgttgatgccggtgcttcaggcggttgtggctgtgatacggcaggttgttggtgttgtgatgcagcttgtgcctgtgttgatgcctgtgattcaacagattttgggtgctgtgatgtctgtgttgccgccgattattggtttgatacggtcgctgataccggtcatcatgtctgttatgcgcgtagtggtgcaggttgtttcggttgtgttgcaggtggttgcccgtattattccggttgtgatgccgattgttacggctgtgatcgggtttgttgcacgtattttgggtgctattgtgtcggctgccgccaggattattggggctgttgcccgtgttgtcggatgggttgtgggccatttcgtgtcgggtttggcgcgtatgggttcggttattcaggctggctggaatcatattagggcttttacgtctgcgtttattaacggtttcaagtcgatcatttctggcggcgtgaacgcggttgtcgggttttttacgcggcttggtttgtcggttgcctcccatgtgaggtctggttttaacgcggcacgtggtgctgtttcttctgcgatgaatgctatccgtagtgtggtgtcttcggtggcgtctgctgttggcgggtttttcgggtcgatggcgtctagggttcggaatggtgctgtgcgcgggtttaacggggcacggagtgcggcctcttctgctatgcatgctatggggtctgccgtgtctaacggtgtgcatagtgtactgggttttttccggaatctgcctggcaatattcggcatgctctcggcaatatggggtccctgttggtgtctgctggccgtgacgtggtgtctggtttgggtaatggtattcggaatgctttgagtggcctgctggatactgtgcgtaatatgggttcccaggtggctaacgctgcgaagtctgtgttgggtattcattccccgtcgagggtgtttcgtgatcaggttggccgtcaggttgttgccggtttggctgaggggatcaccgggaatgctggtttggcgttggatgcgatgtcgggtgttgcttcgcagcttccggatgctgtggatgcccggtttggtgtgcgatcgtctgtgggctcgtttaccccgtacgaccggtatcggcgtgctcagggtgagagtgttgtggtgaatgtgaatggcccgacgtatggtgatcctgccgagtttgcgaagcggattgagcgtcagcagcgtgacgctttgaacgcgttggcttatatgtgagtaaaggggtatgcatgtttattcctgacccgtctgatcgttctggtttgactgtgacatggtctatggatccgcggtttggtgatgagcgtgtgcttcatttgacggattatacggggtcgtctccggtgatgttgttgaatgattcgttgcgcggtttgggtgttcctgaggttgagcatttttctcaaactcatgttggggtgcacgggtcggagtggcgcgggtttaatgtgaagcctcgcgaggtgacgttgccggtgttggtgtcgggtgttgacccggatccggtgggcgggtttcgtgacggttttttgaaagcctatgacgagttgtggtctgcgtttcctcctggcgaggagggggagctgtctgtgaagactcctgccggtgtagagcgtgtgttgaagtgccggtttgattcggtggatgacacgtttacggttgatccggttaatcgtggctatgcgcgttatgtgcttcatttgacggcctatgacccgttttggtatggggatgagcaaaagtttcgtttcagtaacgcaaagttgcaggattggttgggtggcggccctgtcggcaaaaacgggactgcttttccggtggtgttgacgcctggtgttggttcgggttgggataacctgtcgaataagggtgatgtgcctgcgtggcctgtgattcgcgttgaggggccgttggattcgtggtcggtgcagattgatggtttgcgtgtgtcttcggactatcctgtcgaggagtttgattggatcactattgatacggatcctcgtaagcagtctgcgttgttgaacgggtttgaggatgtgatggatcgcctggatgagtgggagtttgcgccgattccgcctggcggttctaagagtgtgaatattgagatggttggtttgggtgccattgttgtgtcggtgcagtacaggtttttgagggcgtggtgaattgttgtggctggtcttgtcccgcagataacattgtttacgccagactatcatcgtgtggcgcctatcaatttttttgagtcgctaaaattgtcgttgaagtggaatggtttgtcgacgctggagttggtggtgtctggtgatcattcgaggcttgacgggttgacgaggccgggtgcacgcctggttgttgattatggtggtggccagattttttctgggcctgtgcgtaaagtgcacggggttgggcctcggcggtcttcccgtgtgactatcacttgtgaggatgatattcgcctgttgtggcgtatgttgatgtggcctgttaattatcgccccggtatggtgggttctgagtggcgtgcagaccgggattatgcccactattctggtgcagccgagtctattgctaagcaggtgttgggggataatgcttggcgttttccgcctggtttgttcatgatagaggatgagaagcgtggccgctatattaaggattttcaggtgcggtttcacgtgtttgcggacaagttgttgcctgtcctgtcgtgggctcggatgactgtttcggtgaaccagtttgagaatgcgaagacggatcagcgggggctggtgtttgattgtgttcctgctgtgacgcgtagccatgtgttgacgtccgagtcgggttcgattgtgtcgtgggagtatgtgagggatgcccccaaggctacgtcggtggttgttggtggccgcggcgagggtcgggatcggctgttttgtgaggatgttgattcgatggccgagggggactggtttgatcgtgtcgaggtgtttaaggatgcccgtaacactgattcggataaggtgtctctttacgatgaggcggagcaggtgttgtcggaatcacaggccacgtctggttttaagatcgagttggccgagtcggatgtgttgcgttttgggcccggcaatctgatgcctggggatttgatttatgttgatgtgggttcggggcctattgcggagattgttcggcagattgatgtggagtgtgattcgcctggtgacggctggacgaaggtgacaccggttgcgggggattatgaggataatccgtcggcgttgctagcgcggcgtgttgccggtttggctgccggtgtgcgggatttgcaaaagttttaaaaaagctcaacggattggggtttgttgtgggtattgtgtgcaagggttttgatggtgtgttgaccgagtatgattgggctcaaatgtctggtctgatgggtaatatgccgtcggtgaaaggtccggacgattttcgtgtcggcacgacgattcagggtgccacagtgttgtgtgaggttttgccggggcaagcgtgggctcacggggtgatgtgtacttcgaatagtgttgagacggtgacgggccagctgccgggtcctggcgagacgagatacgactatgttgttctgtcgcgggattgggagcagaatacggcccggttggagattgttcctggggggcgtgcggagcgtgcccgtgacgtgttgcgtgccgagcctggcgtgtaccatcagcaactgttggctaccctggtgttgtcgtctaacgggttgcagcagcagctggataggcgtgccgtggcggctagggtggcgtttggggagtctgctgcgtgtgaccctacccctgtggagggtgacctggtgatggttccttcgggggctgtgtgggctaaccatgctggcgagtggaggctgttgtctccgcgtatcgagacgggttcgaagtcgatcatgtttggtggatctaatgtgtatgcttacacgatcccgtttgatcgccagtttactagtccgcctgttgtggtggcgtctatggggaccgcggctgggggtacgacacagattgatgtgaaagcctacaatattactagtaaggattttggtttggcgtttatcacgaatgacgggtctaaaccgaatggtgtgcccgcggtggctaactggatagctgtgggcgtgtgacggtacaggcgttgtggtggctggtgtgatgttggggggctgccgtgtcgtggatgactcctgcattggtggcttctatttgtaccgcgttggccacggttttgggttctgttcaggctatcacatcccggtctagaaagcgtttgcgaaggttgtctgcgcaggtggatgctttggaagagtatacgtggggtgtgcggcgtgaggttcgccggtttaacgccaggcttcctgacggggttgatccgcttgtgttgcctgagccgcctggtttcctatcggatgatgttgggggtgagtgatgagggagttggaggaggagaagcggcagcgtcgctcgtttgagagggcttccctgctgttgttgtttttgtcgcttgtgctgttgattgtggttgctgggggtgctttgcgtttcggggctgtatcctctgaacgggattctgagcaggcgagggcccagtcgaatggtacagcggccaggggtttagccagccgtgtgcggcaggtgtgtgcccatggtgggatggagtcggtacggcttcaccggtctggtttgtgtgtggatgctgtgcgtacggagcggagtgttcagggtgtgccgggcccggctggtgagcgcggcccgcaaggccctgcaggtgctgatgggcgtgacggtgttaatggttcgtctgggctggttggccctgttggtccgcagggttctcccggcttgaatggcgtgaaaggtcctgacgggttgcctggtgcaaatggatcggatggccgtgatggtgttccgggccgtgcaggtgttgacggcgctgatggtcgggatggttcggctggtgagcgcggtgatgtgggtccttcaggtcctgccggcccgcaaggtgcacagggggaacggggtgagcgtggccccgtcggtgcgaacggatccgatggtaaagatggtaaggatgggcgctcggtggtgtctgtgtactgttctgatggtctcctggttgtgaaatatagtgacggtgtggcttctacaatatcgggctcggtggcctgccagggtgtgaaaccgtcgcctatggtgactatatcatcccacaaatagaaaggagtggctgtgatggtagtgtttggtggtggtgtgtggtgaggtttatcccagcagcgcaccattctgccggttcgaatagtccggtgaatagggttgtgattcatgcgacgtgcccggatgtggggtttccgtccgcctcacgtagggggagggctgtttctacggcaaactattttgcttccccatcgtctgggggttctgcccattatgtgtgcgatattagtgagacggtgcaatgtctgtctgagtctacgattggttggcatgccccgcctaaccctcatagtttgggtatagagatttgcgcggatggtggctcgcacgcctcgttcagggtgccggggcatgcttacactcgtgagcagtggcttgaccctcgcgtgtggcccgcggtggagcgtgccgcgatcctgtgtagacgtttgtgtgacaaatataatgttccgaaaaggaagcttagtgcagccgatttgaaggctggcaggcggggtgtttgcggccacgtggatgttacggatgcgtggcatcagtcggatcatgacgatcctgggccgtggtttccgtgggacaaatttatggccgtagtctgcggcggtagtggtagtgaggagttaactgtggctgatgtgaaagccttgcatgatcagattaaacaattgtctgcccagcttactggttcggtgaataagctgcaccatgatgttggtgtggtacaggtacagaatggtgatttgggtaaacgtgttgatgccttgtcgtgggtgaagaatccggtgacggggaagttgtggcgcacgaaggatgctttgtggagtgtctggtattacgtgttggagtgtcgcagccgcattgacaggcttgagtctactgttaacggtttgaaaaagtgatggtggtttgttgtgggtaaacagttttggttaggtttactggagcgggccctgaaaacttttattcaaacgtttgttgccgtgctcggtgttactgcgggtgtcacgtatactgcggagtcgtttcgcggtttgccgtgggagtcggcgttgatcacagccacggttgctgcggtgttgtcggttgctacttcgtttggtaatccgacgtttgtggctggtaagccgaagactacggttgtggataccgggcttgttccacccgatgataccggtttgatagaaccgcatgcggtggatgtgtcggatcctggcatgattgagccgatggatgatgcggatgttgccggctatgtgccgaagcgggctgccgagtcggaggttggcacagtagagtctactgttgcataattgaatatgtgtgtgccccagcggtgctgccacgattgtgtggtggttgccgctggggcacactttttgtttatgcgatatggctatgattcgttgctgtcgatggtgtcttcgagcatctgatacaggtggaggcaggtgcagatggtttcgctggcctggtcgagaacgtttcggccgataacgtttttgtggttgtcgcggtggcggatgatagcccacatgatctcgtcggctgccgcctgtaatagttttgcctggtatgcgattccggcgagccagtctagtgcttcctggcttgcctgtgtgtcgtctggaataccacgggtgttgctgttgcttgggtgtccttcactgtcgcatagccacaggatttcgctgcactcgtctagcgtgtcctggtcgatagcgagatcgtcgaggctgacattgttgacggtaaggttcacgttgtcgagggagatgggtacaccgtactggttttcgacactgtcaacaatgttttgtagttgttgcatgttggtgggctgttgttggatgatacggtgtaccgctgctttgagggcagtgtaggggatattgtgtgtgttgttcatggttttatttcatccctgtgctgtcgtcgttatcgtctggatagtatctactgtttgcgtaccctgttagggtgatcaatgtttggtctgcccactgtttcacggtttgccgggttacccctaatcgttgggctgctaccgaataggtttgatcatacccgtatacttcccggaatgctgccaaccgtgctaggtgttttcgctgtttggatggctggcaggtgagggtgtagtcgtcgatggccagctggaggtcgatcatggagacgatgttgttgccgtgatgctggggggcggttggtgggggtggcataccgggttctactgatggtttccatgggccgccgttccagatccattgggcggcttggataatatctgcggtggtgtaagtccggttcactggtcaccccctgaacaggttgtcgaggttgtctgggttactggtgttggtggtgtcgaatcgtcccacacagtggcagtagtcgtacatgagtttgataatgtgttggtggtcgccgaggtaggtgttgccactaatactgtaggtggctgtgccgtctttgccgataatgtatttggcggtgatggtttctggtgtttcggtgttggtgatgattgctgttgtggtggtgcctacggtttgtagcctggtggtttgggttccgtcgtcgagggtggtggtaaccataattggggttttccttaaatgcttgtctggttgtcggctagatgaataatatcggataaaggtttcggctggtctaggtgctgtaccgctttgttggctaaacgtttggctaccctgtaacacattttggtatagtgtttgttgtctaggttgtggtattgttcccgcaccgcaatatatagtagggagtcttggtacaggtcgtctgcactgattgcggggtagtgggtggctactttgatgcatgaccggttgagtgtgcgaagatgatggtcggtggtccatccccacgatgcggtggtggcccggtctgcttttgttggtcgtctactcatggcactatttcatctcgctatctggtagttgtttggtgttttatggttgatagtgtagcacacgagtccggggttgccggtggtgcccgtcttgtgccggtaccatgtggattcgccttccatggatgggcattggatgaaggtgcgttgtccttgctcggagatttctaggtggtgtcggtgcccggccatgaggatgtgggatgtggttccgttgtggaattcttgtccgcgccaccaatcatagtgtttgccggtgcgccattggtgtccgtgggcgtgcaggatttgtgtgcctgccacattgacggtggtggtcatttcgtctcggctggggaagtggaagtgtaggttggggtattggttgttgagttggtaggcttcggcgatggcgcggcagcagtccacgtcgaaggagtcgtcgtaggtggtgacgcctttgccgaagcgcacggcttcaccgtggttgccggggatggatgtgaccgttaggttggcgcagtggtcgaattggtggatgagttgcatcatggccatgcgggtgagccggatttgttcggtgaggggtgtttgtgtgcgccaggcgttgttgcctccttgtgacacgtatccttcgatcatgtcgccgaggaatgcgatgtggactcgttgcggtttgcctgcctgttgccagtagtgttttgcgactatgagggagtgcaaatagtcgtcggcgaagtgtgctgtttctcctccggggatgcctttgccgatttggaagtctcctgccccgatgacgaaggccgcagtgctgtagtcggtgcgggtgtcttgttcgggttttggtggctgccattcggctagtttatctacgagttcgtctacagggtaggggtttgttgcgggttggtggtcgatgattttttgtacggatcggccggtttctccgttcggtaaggtccattcggagatgcgtgtgcggcgtacagtaccattggctagattgtcgtcgatggtgtcgatggcgttgtcgtggttggctagctgtgtgagtagccggtctatattgtctatcactgggtatcctcttcctcgtgtggggtggtgttggcttgtttgcggcgatagtctttaataacggtggcggagatggggtatccggcttgggtgagctgttttgctagccatgaggcggggatggttttgtcggcgaggacgtctgcggctttgttgccgtagcgttggataagggtttcagttttggttgccatgatatcctaggggttgtgtggcgggttgccatcctgtgcggcagtcgccgtcgtgtcctggcttacgggtgcaccatgtgatggttccgtctgtgtggtggagttttttgccgcacatgacgttttgtagatgctccggcagctggtcggtgttgttgctggtttgtatgtcgaagagtgttttctggttggtgaaatgctctgacacggtgccattatgcacgggtagtatccatgttttccattgctgttgtagcctggtgttccagtggaattgtttggcggcgttttcggcctgttttaaggttttgtagtagccgactagtatgcgctggtgttcactgtcgggtgggttttggcctcgccaatattgtgccgccacggcgtagcggttgctggctgtgaaggcgtcccagcagtattcgataatgtgttgtagtgcactatcgggcatgtcttgtatttggttttcgttaagccattcttcaacaaggatgttgtgtatggcgcgtttgtctttgatggttggtttgaacgagatgctcacgatagtaccggctggtcgtcttgcatgaactggttgaaggtgttgtttccggcgtgttgggcttgtgtgatgtcctggtcggtccagtcggggtgttgctgtttcagatagtgccagtggcacgcattgtaggtttcgtcttgtagccgtgtgagatggttttcggtgatgatttgtttccacattgtccatgacacgtcgagccggttgaggatttcgagggctgggatgttaaattggttgaggaagagtatttcgtgggtgtagtagtttttctcgtaggcgtcccatccgcttcggtgcctgttgggctggtttttggggtaggcttcccggcatactttgtgcaaatgtttggccatgtcgtcgggtagtttaatgtcggggttggcgcggatcatggatcgcataccatcataggtggtgccccaggtgtgcataatgtaggtggggttttctccatcagcccatttttctgcacagatggcgaggcggatgcgcctcctggctgcttggctaatgttgcgccggttggggatggggcacgtgtctaggggatccatgatgttttagtgtacctttctttgttggggttgcttgtgtggttttattgtagcactgtgttgagtgcttgtgtcaaccctgttttgccggcctgaaggtaggtgtctgtgacatcccccagggtgaggggcacgtgtacggcttgggggagtgctgtttggagggtttgggccatcttgtctcccgcggggtcgggatcggaccagatgtaaacatggtcgtagccttcgaagaatttggtccaaaagttttgccacgaggttgcgccgggtatggcgacggccgaccatccgcattgttcgaggatcatggagtcgaattcgccttcgcaaatgtgcatttcggctgccgggttggccatggcggccatgttgtagatggagcccgtgtctccggccggggttaagtatttggggtggttgtgttctttgcagtcgtgtgggagtgagcagcggaaacgcatttttcttatttcggctggccgcccccaaacggggtacatgtaggggatggtgatgcactggttgtagtcttcgtggcctgggatggggtcattgtcgatgtatccaaggtggtggtagcgggctgtttcttcgctgatgcctcttgctgagagaaggtcgagaatgttttcgaggtgggtttcgtagagggccgaggctttctggattcggcggcgttccgcaatgttgtatgggcgtatgctgtcgtacattcgggtttctttcttcgagttgttgttgtagtttggcgaggccgcctccgacaccgcatgtgtggcagtaccagacgcccttgtcgaggttgatgctcatggagggttggtggtcgtcgtggaacgggcagaggatgtgttgctcgttcctggacgggttgtagcgtatccggtaggtgtcgaggaggcggcaggtgtcagaggtgtgggaggagttctgcgagggttgataccacataggcttcgctccatggcttgttgcgctgtttcatgaccactaacccgattgtggatttgtcaaccaggttgcggtgggtttcatagttgcgcgcctcccggctggcttgtttcacgaattgggcgagatgttgctgtcctgctttcgcttcgatcacataggttttgtggccggttgtgaggatgaggtcgccttcgtcttcgtggccgttgaggtgtagccgttcgatgtcgtgtccgatgtcacgtagctggtgcaataatcgtgtttcccactcggcaccggcccggcggttgcgtgattgctgtgtagccatcataatcctttgtgtgttgtggccatgttccatggctgtttttcggctagtggtccgaagaatgtgtattcggggtaggctcgtagccgttcgtatcgggtgccgtctgggctggatttgcctgtgcgctgtttcaacactgcgatgcgcgcctctgccggtatcgatagcccgttgccgttatcctcgccaccatacaatgagactccgaggatgagttgtggtttctcggatagcccgtttttgatctctcgtctggcgggcgggtgttcgatgtcggagccggttttgtcggttgcgtggtgtgtgacgataatggtggagccagtatccctacctaatgctgtgatccattgcatggcttcttgctgtgcctggtagtcactctcgcagtcttggatgtccatcaggttgtcgataacaatgagtggtgggaaggtgttccacatttccatgtaggcttgcagctccatggtgatgtctgtccatgtgatgggtgactggaatgagaatgtgatgtgttggccgtggtggatgctgcctcgatagtattctggcccgtagtcgtcgatgttgtgttgtatttgggcggttgtgtgttgggtgttgagggatatgattcgtgtggaggcctcccagggtgtcatgtcccctgaaatatatagggcgggctggttgagcatcgcggtgatgaacattgctagcccggatttttggctgccggaccgccccgcaatcatgacgagatcccctttgtggatgtgcatgtcttggttgcggtagaggggttctagttgtggtatacggggcagctcagcagcggtttgggaggctctctcgaaggatcgttgtagagagagcatcgggaccttaatctatctatctgttacggtttggatgaatattggcggtcagatggagtcgatatctacatcatcgctgccggtggtgttgggctggctgtctcgctggtcaacgtaggcggctacaaggtcgtagatggcgtcgtctaggggtttgaggatgacagcgttgaacccgtttttagtgcgcactgtggcgagtttgaaggcctgctcctcgccgaggtaggtttcgagttcgcggatcatggagtgtgggcggtcgttgttgcctcgcgctttttcgatgatagcgttggggatggtttctggggtgccgttgttgaggtcgtcgagggtgtggaagatagtaacgtcggcgtaaatacggtctgcgacctgtccgccgtagccttcggtgttgtgttccacgtcgtggattttgaaggcgatggcggtggcgtcctggtttttggacgggttgaagaaggtgctgctgttgctgttgttgcggtagttggcgagtcccataacttttgtccttttgctgtttgtgttgttttgttgtcttatattggtttatcgggtgaggctgtttcgtttagtgcggaacgcctcagacacgtcactgttactggtgatgatctttttgtactgtttcaagaggtctgctaattgtgctttactggtggctttgttgatcctgtcgatgataatgtcgttttcttgattggcgattttgttgacgtagtctttggctgctttgtcgtatcggtcttggaggatgatggatgcgctcgctacgagcgttgccagatcccagtctttggagactgtttcgtctttgagtccgcctagcaggtcgatgatggcctgttttgtctgctctgctgtgtctcctcggatgaccgcccatggtgcagcatagtctccaccatatttgagtgtgatagtgagtcgatcattgtctgtggtgcgctcttctgtcacttgttttccttttctttattgtctgcttggggtggctgtacggtggattctaccgggtatctgtaggcgtctttcccgtctaccgcccagcaggcgtcctgtacggggcatcctttacagagtgctgtaacatgtgggacgaagatgcctttgctgattcctttcattgcttgactgtacatggatgatacatgccggtaggtattgttgtcaagatcgtacagttcggttgctgtgccctgagtttgcgatgtggtgttgtttcggctgctggcgggtgtccaaaacatgcctttcgtcacgttgatgtcgtgttggttgagcatgtaccggtaggtgtgcaactgcatggcatcaacagggaggcgacccgttttgaggtcgagaataaacgtctcaccagtgtcggtgtcggtgaagatacggtcgatgtagccaacaatctttgtgccgtcctggagggtggtttcgactgggtattcgatgcctggctggccgtcgagtattgctgtgtggtattgtggatagtttgtgcgccactgtttccacctgtcgacgaagatggggccatagatcatccaccagtcgtagtctttcttgtgtggcccgcctgactcgcacatgtttttgcacactctgccggagggtttgatttctgtgccttcggattcgacgagggcaacttgggtgtcgaaaacgtttttgaaggatgagagtttgtctggcagtgcagggtattcgtcggggttgtacaggtggaggtcgtactgttcggtgatgtggtgtatggcgcttccggcgatggttgcgtaccaggtgtggtgctgtgcatgatagccgtgggataggcgccatttttctccgcattcggcccactgggtgagtgaactgtaggagatgtggcctggatggttgatggttttcggatattgtgctagaggcattacttgtcgcttttgttccatgggttgcgggtgtcttggccggcattgtgttgctggtaggcgaggagtgctaggcagtgccaggctgcgtgtgccaggtgtggcaggtgtgattcatcgtcgaggttgtttccttgctgccaggatagcacatggcggtagagggcgtcgacactgtgacaccaggggtatcctccggtccagttgttgtcgccgtatttggtggcaccgtagcctgctacttcgcctagggcgtgcaaggctacggggtcaatgagggagagcctgcagagtttgagttcttttcgggcacctgtgtcggggtcggtgtacatgcgggtgggctcatccatggggggtgtgtgcctttcttggtttgggttactggttgttgtcgtgggctagtgctactgcgagaataatgatggcgagggtttcagcaataagtatgggtgttgtgatcatttgctgtctcggggattgttggtgagggttgaggcacccaggagggtggcgagggcgcatgcggcgataatggcgagggctgccttgtggggggtgccggttgcgtacatccatgtgatgatgccgccttggatccatgccagtgtggtgaagaaggtttcgtaactgtgcaactcgatactgttgggtgtgttcatgctcgctcctgaagaatggtgttgatggttttgtaaatgttgtacaggtcggtttcgatagataacagttggtggatttggtggtcgaggttgatatctgggttgagggtgttgatgcgggatgcgatgtcggtggctgtgcgtagtgtgccgccggtgtggtgaataatgtgtgcggtgtcggcgagtccggtggtgacagcatagtgggagaggagaggcatagcggggatgctccttggcgggttactgttgcgggttgatgttgaggtcggtgacgtgcgggtggtcttctgttcctgtgatgaggcagtggacggtgactgggagtttggatgcgccgggctgtttcatggttgcgccgtagacgatgctgaacgtgtctttaccgatggttttgtggagttggaggtcgatgtcggggttgccgttccagttgacgccgtgtgcggcggccttctgttcggctttacggttgcaggtgtgtgctgcggtgatcatggtgagaccctgcgcggtttcttcaccccttgcttgggcttgcttgtgggttttggcttgttcggcttgtagggagcgggtggcggctgcctgccgtgccgctttctcggctttgcgctgttgggcggtttttggtgtccattctgtgttggctgtggttacctgtggtgcgggttgtgatgcgagtggggggttgtcgtcgggggctgggaggaaggatgcggcggcgatgatggcggctgtgattccggcgatggtgtagccgtttttcttgttcatgactgttatcccctttccggggtgttgttcgttgctgacatgattgatacttccagacggggctatgactgtcaaggtgtcgctcagtttgtgtgagcgatccttgtgtggctgggggttatcgggcgaacagggtgagtaggtgtcctaagttgatgcgactcacgttccagtagagttgcgtggcttcaccgccagtgagcggcttccacttgttgtggctgaacactgtaccgtcggatgctatgaacgtgtcggggcgtagcttgtgaagttcagtctctacgctctgccggtaggcttcggcgaggccctcaaaatccatgtggtcaccggagaggttttcgaggcgtgtcaggtcgaagggtgtggggcagtcgtagctggcgggggtgtagagctgggtgaagtggtcggcgatcttttgcatcatgattccttttctagtgtggtgggttaatagttttatcgggtggatgcgacaaggatggcgtctatgtcgatcatgtcgatgagatcgtggagttcctcggcctcattctcagataggtggcgccagtcgtagtcgccgtacacggcgccgtcgagggtgacagtccacaggggccggatgagccgtatggcttcttgtactttggcgtggtacatgcggcgcaccatatccagatcgatgtcgtctgaatggtttccggtgaggctgtggagactgagggggtcgatttctgtctgctggtagaggctggtgaaggatggggtgatgagtgtgccatccatgggggggtgctcctttctggattgtttgggttggttgttgtggtttctaggatgtgtaggttgcgacccacagtcaaggctgcgctcaatccgaatgagcgtttagcgtgtgtggcatgggatgtggcgtatctcacttaagccttccttgcctctctaggcgtctcaaatcttctgggggtaggattatatagggttgaccctgctgatcgattctagagcacttctagggcctctcgggggtatgtctgagtgatgacgggtgtggcagatgatctagcgagtcaaggtgccgagcttagacataaaatctatcatctaggtgtgtgagatgtatcacatcctcctggcttggtgtgcactttcaaggctactctgtcgatctgacgtggagggtgtagcccagaaataccgtttaaagccactgggagacgcctagaagcgccttacggggtgggggctaggtatttatacccccagcatattctgatcgattctagacgcctacagaagcctggtacacgatcagctatccagacgcagaccatcagcccctatcccgcttagctaagcctgcactatgtggacattgttggatactgtagaggaaagaaggacacggtaaaggaaagagggggaatcagtcttagggtcttaggtacttcagttcaccttaggggcttagcgctgagcacttagcgctaagcccctcaagggctcggcatcagcctgacaggcttagcccatactgcacagccctgaaaggagtacacgccatcagggaaggcttgagagtacgaggagcctcagcgacgagtactcgaaagcctgagggaacacctttagcactgatgggcctagcgcgttcggaaagaacacagaagtaaagtgtgacagctgtccgggagtgaaccccgttctggctaggggtttcagtcttaactacctgtaaaggttacaagactctaagaaaatttaagaaaattcttaagaagaaagttgtgttgttatcccccaaaaaacacccgtttacacccctcaaacccgcctatagagccaaatccgccagtttgactcgtcccaggtggcgtatgctaggctggacaggtagccagctggacgcgaggccagaaagtgctgacgcacttcccgacctcgcttaccatcagtctaccaaacactttaaagcttcaaggctaagccactcagtgctaagcccttaagacctcaacgcttagcaccgagcccttgaggggctcagcattagcactaaggcttaaacacttaataatttaagtaaacataaaagcttttaagacttaaagtaaatatataaccttaacagttaaacgtttaaagctttaaaccttaacacctaagttaggtataaaaccttaaaggcttagcacttaaggatataaacttaacatcagtgtttaagactttaaaacttaaagtaactataagacttaaagacttataagctttaatacttatataataataaagtttaagactgatggttaactttaagtgtttaaagtcttatagttactttaagttttaaagcttataagttataaaagttttagaagagctaaggggttaacttctttacttctctactctctttggttctttctctcttctcttcttttcttcatcaggggagaagaggaacctttaccatcagcgctgatgggctttcacggtgtgtctcgtgtgtctctggtcgcaagctcccatcgcaccctcgccacccctcaccttgaccgtgtctcctttacagcttggtgtgttcggctgaaggcgtacggcgtgtcacgctaacacccttaacaccaggtaagacttaaagtgtatattatatgtagaagactttaaaaactttgaggatgtacacgttttggctgtgacctacaccgctaggcgctaggccttgaaacgcgaacacaccctcccccatttttcttccgtgtccttcttcttttgacacagctggggggcgatgtgatctttctcacatgcaggggtggagggtagaaaacaaccaccccaccacaaacagaacaccccaccaaacgaacaaaacagggcctagaatcgaccagcagggcaagggcaaggtattcatacccccaacgcatttcaggctgttacagaggcaatcagaggcttacagggaccataggtgaacgggaggcgcgatggcacacaccaaccgcaccgcatccgccgcccaccggcgctggcggcaacgactcatcacccaagcccgacaacaaggccaaaccgaatgtcccttgtgtggagccaccatcacctgggacacacacgacctaccaaccagccccgaagccgaccacatcacacctgtcagcaggggaggactcaacaccctcgacaacggccaaatcatctgcagaacatgcaacagaagcaaaggcaacagaacacaaccaaacattcgattccaacaacaaaccacaaaaacattgattccatggtgacaaaccccacaacccccaccggggacaccccctgcacacccgtgcaagacc

SEQ ID NO: 44 - DNA, 29451 bp, Bacteriophage of P. acnes
agtgaaatacctcccttttgtggatttatctgtttgtcgactttttgtgttggtggtgagtgttgtgcagcctgagcttcctgggtctcgtgattggtgtggggagacgcttcgctggtggcgtgtgtggggtgaggatagtcgcgcatcgtacgtgtcggatgaggagtggctgtttctcatggatgctgcggtgattcatgattgtgtgtggcgtgagggccgggctgaccttgtggcttcgcttcgtgctcatgtgaaggcttttatgggcatgttggatcgttattcggttgatgtggcgtctggtggccgtggtgggggttctgcggtggcgatgattgaccggtatcggaagcgcaagggggcctgattaggtgtctggtgttgttgggtctcaggtgcctcgtcaccgtgtggctgcggcgtattcggtgactgccggcggggatgctggggaattgggtcgtgcgtatgggttgatgcctgatccgtggcagcagcaggtgttggatgattggcttgctgtcggtggtaatggcaggcttgcttctggtgtgtgtggggtgtttgttccgcggcagaatggcaagaatgctattttggagattgtggagttgtttaaggcgactattcagggtcgccgtattttgcatacggctcacgagttgaagtcggctcgtaaggcgtttatgcgtttgaggtcgttttttgagaatgagcggcagtttcctgacttgtatcgtatggtgaagtcgattcgtgcgacgaatggtcaggaggctattgtgttgcatcatccggattgtgccacgtttgagcgtaagtgtggctgtccgggttggggttcggttgagtttgtggcccgttctcgtggttctgctcgcgggtttacggttgatgatttggtgtgtgatgaggctcaggagttgtcggatgagcagttggaggctttgcttcctaccgtgagcgctgcaccgtctggtgatcctcagcagattttccttggtaccccgccggggcctttggctgacggtagcgtggtgttgcgtcttcgcgggcaggctttgtcgggtggtaaaaggattgcgtggacggagttttcgattcctgacgagacggttccggatgatctatcgaggtcgtggcggaagttggctggggatacgaatcctgcgctgggtcgccgcctgaatttcgggacggtgagcgatgagcatgagtcgatgtcggctgccgggtttgctcgggagaggcttggctggtgggatcgtggccagtcggctacgtctgtgataccggccgataagtgggctcagtctgctgtggatgaggcgagtctggttggcgggaaagtgtttggtatctctttttcgcgatcaggcaatagggttgctttggctggtgccggcaggactgatgctggtgttcatgttgaggttattgatggcctgtcggggacgattgtggatggtgtaggccagctggctgactggttggcgttgcgttggggtgacacggaaaagatcatggttgccggttcgggtgctgtgttgttgcagaaggctttgactgatcgtggtgttccgggtcggggtgttgtggttgccgatactggggtgtatgtggaggcgtgtcaagcctttctggaaggcgtaaggtctgggagtgtttctcatcctcgtgctgattctcgccgtgacatgttggatattgctgtaaggtcggcggttcagaaacataaaggctctgcgtggggttggggttccacatttaaggacggttctgaggttcctttggaggctgtgtcgctggcgtattttggtgcgaaaacagttaaagcgaagcggcgtgagcgtagtggtaggaagcgggtgtctgtggtatgaactcggatgagttggctctgattgagggcatgtttgatcgtattaagagtttgtcttcgtggcattgtcgcattgagggctactatgagggttctagccgggtgcgtgatttgggggtagctattcccccggagttgcagcgtgtgcagactgtggtgtcgtggcctgggattgcggtggatgctttggaggagcgtctggattggctgggctggactaatggtgacggctacggcctggatggtgtgtatgctgcgaatcggcttgctacggcgtcgtgtgatgtgcatttggatgcgctgatttttggtttgtcgtttgtggctatcattcctcatggtgatggttcggtgtcggttcgtccgcagtcaccaaagaattgtactggccggttttctgccgatgggtctcgtctggatgctggccttgtggtgcagcagacgtgtgatcctgaggttgttgaggcggagttgttgcttcctgatgtgattgttcaggttgagcggcggggttcgcgtgaatgggttgaggtggatcgtataccgaatgtgttgggtgctgttccgcttgtgcctattgtgaatcgtcgccgtacttctaggattgatggccgttcggagattacgaggtctattagggcttacacggatgaggctgtgcgcacactgttggggcagtctgtgaatcgtgatttttatgcgtatcctcagcgttgggtgactggcgtgagcgcggatgagttttcgcagcctggctgggtcctgtcgatggcttctgtgtgggctgtcgataaggatgatgatggggacactccgaatgtggggtcgtttcctgtcaattcgcctacaccgtattcggatcagatgagactgttggcgcagttgacggctggtgaggcggctgttccggaacgctatttcgggtttatcacgtctaacccgcctagtggggaggctttggcggccgaggaatctcggcttgtgaagcgtgctgagcggcgccaaacgtcgtttggtcagggctggctgtcggttggtttcctggctgccaagtcgcttgattcttccgttaacgaagctgatttttttggtgatgttggtttgcgttggcgtgatgcatcaacacctactcgggcggctacagcggatgctgtgacgaagctggttggtgccggtattttgcctgctgattctcgcacggtgttggagatgctggggcttgatgatgtgcaggttgaggctgtgatgcggcatcgcgccgaatctgcggatccgttggctgcgcttgctggggctatttcccgtcaaacgaacgaggtttgatggatggcttcgggtgctatgtcgaggctggctgcgactgagtatcagcgtgaggcggtcaggtttgctgggaagtatgcgggctattattctgagcttggccgtttgtggcgtgccggcaggatgagtgacacacagtatgttcgtttgtgtgtggagttggagcgtgccggccatgatggttcggcgtcgttggccgccaggtttgtgtcggattttcggaagcttaacggtgtcgatcctggtttgattgtgtatgacgagtttgatgctgccgcggctttggctaggtcgttttcgactatgaagattatgaatagtgacccggatcgggcgaatgatacgattgatgcgatggcggcgggttttgatcgggctgtcatgaatgctggtcgtgacacggttgagtggtctgcgggtgcgcagggtaggtcgtggcgtcgtgtcacggatggggatccgtgtgctttttgtgccatgttggctacgaggtcggattatacgactaaggaaagggcgctcactactggtcatacgcggcgtcataagcgtggtggtaagcgtccgtttggttcgaagtatcatgatcattgtgggtgtacggtggttgaggttgttggcccttgggaaccgaatagggctgatgccgagtatcagaggacgtatgagaaggctcgcgagtgggttgatgatcatgggttgcagcagtcgcctggcaatattttgaaggctatgcgtactgttggtggcatgagataatttgatgtggtttccggttgtgcgccgccggttatcggtgcacagggttgtctcccgcacgggggtcaacaatgttgtgttgttttccgcaaggagtgtagggttaggctatggccgatcagagtgttgaggaacagaatgttgacaatgatgttgtggagtccggaaagggtgacggcattgttgacacggtgaagggcgatcaaggcaaacaggttgaagatcagtcgaagaatgaaggcgagggtaaatcgccggggactgattggaaggctgaggctcgtaaatgggagtctcgtgcgaaaagtaatttttccgagctggagaagcttcgtacatcgagtgacgattctggatctactattgatgagcttcgccgcaagaatgaggaactcgaagacaggatcaacgggtttgttcttgagggtgtgaagcgtgatgtggctgccgagtgtggcctttcgggtgatgctgtcgcttttctgcacggcgacgatcgtgaagcgctggtggagtctgctaaggctttgaagggtttgatcgaccatagtagtggtggcgcgggtgtgcgccgtcttgcggggagtgcccccgttgatgatgttaaacgacgtgagggtgtcgcgtttgtggatgctcttgtcaataattctaggagatgatttgtgatggctgacgattttctttctgcagggaagcttgagcttcctggttctatgattggtgcggttcgtgaccgtgctatcgattctggtgttttggcgaagctgtcgccggagcagccgactatttttggccctgtgaagggtgccgtgtttagtggtgttcctcgcgctaagattgttggtgagggtgaggttaagccttccgcgtctgttgatgtttcggcgtttactgcgcagcctatcaaggttgtgactcagcagcgtgtttcggacgagtttatgtgggctgatgctgattaccgtctgggtgttttgcaggatctgatttccccggctcttggtgcttcgattggtcgcgctgttgatctgattgctttccatggtattgatccggctacgggtaagcctgctgcggctgtgaagacttcgctggataagacgaagcatgttgttgatgccacggattctgccacgactgatctggtcaaggcggtcggcctgattgctggtgctggtttgcaggttcctaacggtgtcgccctggatccggcgttctcgtttgctctgtcgactgaggtgtatccgaaggggtctccgcttgccggtcagccgatgtatcctgccgccgggttcgctggtttggataattggcgcggcctgaatgttggtgcttcttcgactgtttcgggtgccccggagatgtcgcctgcctctggtgtgaaggctattgttggtgatttctctcgtgtccattgggggttccagcgtaacttcccgatcgagctgatcgagtatggtgacccggatcagactggccgcgaccttaagggccacaatgaggttatggttcgcgccgaggctgtcctgtatgtggctatcgagtcgcttgactcgtttgctgttgtgaaggagaaggcttccccgaagcctaatccgccggccgagaactgatttatttgttgcgataatgttcatgctgtgtgcagggggtggtgttgatgggtatcattttgaggcctgaggatattgagcctttcgccgatattcctaaagataagcttgaggcgatgattgccgatgtggaggctgttgctgtcagtgtcgccccctgtatcgctaaaccggatttcaaatacaaggatgctgctaaggctatcctacgtagggctttgctgcgctggaatgatactggtgtttctgggcaggttcagtatgagtctgcgggcccgtttgctcagactacacggtctagtactcccacgaacttgttgtggccttccgagattgccgcgttgaagaagctgtgtgagggtgatggtggggctggtaaagcgttcactatcacaccgaccatgaggagtagtgtgaatcattctgaggtgtgttccacggtgtggggtgagggttgctcgtgcgggtcgaatattaacggctacgctggccctttgtgggagatatgatatgaccagttttccttacggtgaaacggttgtgatgcttcagccgactgttcgtgtcgatgatttgggcgacaaggttgaggattggggtcatcctgtagaaaccgtgtaccataacgtggctatctatgcttccgtttcgcaggaggatgaggccgcggggcgtgattctgattatgagcattggtcgatgcttttcaagcagcctgttgtgggcgctgattatcgttgtaggtggcgtattcggggtgtggtgtgggaggctgacgggtctcctattgtgtggcatcacccaatgtctggctgggatgctggtacgcaggttaatgtgaagcgtaagaagggctgatggttgtggcacgtgatgtgaatgtgaagcttaatcttcctggtatccgtgaggtgttgaagtcttctggggtgcagggcatgttggcggagcgtggcgagcgtgtcaagcatgcggcctctgctaatgttggcggtaatgcttttgatagggcccagtatcgtgccgggttgtcgtcggaggtgcaggttcaccgtgttgaggctgtcgctaggattggcaccacctataagggtggtaagcgtattgaggcgaagcatggcacgttggctaggtcgattggggctgcgtcgtgatcgtttacggtgatccgcgaatatgggcgaaacgcgtgctcaaggatgatggctggctgtccgatataccgtgtacaggtactgtcccggatgatttcacgggtgacttgatttggttggcgttggatggtggcccgcagttgcatgttcgtgagcgtgtttttttgcgggtgaatgtgttttctgatatgccggatcgtgctatgtctttggcgcgtcgtgttgaggctgtgctggctgatggtgttgatggtgatccggtggtgttttgtaggcgttctactggtcctgatttgttggttgatggtgcacgttttgatgtgtattcgctgtttgagctggtgtgccgtcctgtcgaatccgagtaaacgtatttgttttctatattttgtttttgtttgattatttttgggggttgtgatggctgctacacgtaaagcgtctaatgttcgctctgctgttacgggtgacgtctatattggtaaagctcatgccggtgacactattgatggtgtgaagacggttcctgacggtcttaccgctttagggtatctgtctgatgacgggtttaagattaagccggagcgtaaaacggatgatttgaaggcttggcagaatgcggatgttgttcgcactgtggctacggagtcgtctatcgagatttctttccagctgatcgagtctaagaaggaggttatcgaactgttttggcagtcgaaggttactgccggagccgattcgggttcgttcgatatttctcctggtgccacgacgggtgttcatgccctgttgatggatattattgatggcgatcaggttattcgctactatttccctgaggttgagttgattgatcgtgacgagattaagggtaagaatggcgaggtgtacgggtatggtgtgacgttgaaggcgtatcctgcccagattaataagaatggtgatgcggtgtcgggtcgggggtggatgacggctttaaaagctgatactcctccgactcctcctccggccccgaagcctccgaagcctgagccggatccgaatccgccgtctaataactgatacacatagtttgagggattgttgatagatgagtgacacaggttacacgttgaagattggtgaccgtagctgggtgttggcggatgcggaggaaacggcgcaggctgttcctgcccgcgttttccgtcgtgccgccaggattgcccagtcgggggagtctgcggatttcgcccaggttgaggtgatgttttctatgttggaggctgccgccccagaggatgctgtggaggccttggaggggcttcctatggttcgtgtggccgagattttccgccagtggatggaatataagcctgaaggtaagggtgcctcgctgggggaatagtttggctccacggcctgattgatgattatcgtggggccatcgaatacgatttccgcactaaatttggtgtttctgtttatagtgttggtggcccgcagatgtgttggggtgaggctgtccggctggctggcgtgttgtgtaccgatacgtctagccagttggcggcccacctgaatggttggcagcgcccgtttgagtggtgtgagtgggctgtgctggacatgttggatcattacaggtctgctaatagtgaggggcagccggagcctgtggcgaggcctacggatgagcgtagggcccggtttacgtctgggcaggtggacgatattttggcgcgtgttcgtgccggcggcggggtgtctcgcgagattaatattatggggtgaatagtgtatgtctggtgagattgcttccgcatatgtgtcgttgtatacgaagatgcctggccttaaaagtgatgttggtaaacagctttctggggttatgcctgctgagggtcagcgttcgggtagtctttttgctaagggcatgaagttggctcttggtggcgccgcaatggtgggtgctatcaatgttgctaagaagggcctcaagtcgatttatgatgtgactattggtggcggtatagctagggcgatggctatcgatgaggctcaggctaaactgactggtttgggtcatacgtcttctgacacgtcttcgattatgaattcggctattgaggctgtgactggtacgtcgtatgcgttgggtgatgcggcttctactgctgccgcgttgtctgcttcgggtgtgcagtctggcgggcagatgacggatgtgttgaagactatcgccgatgtgtcttatatttcgggtaagtcgtttcaggatacgggcgctatttttacgtctgtgatggctcgcggtaagttgcagggcgatgacatgttgcagcttacgatggcgggtgttcctgtgctgtctttgcttgccaggcagacgggtaaaacctcggctgaggtgtcgcagatggtgtcgaaggggcagattgattttaacacgtttgcggctgcgatgaagcttggcatgggtggtgctgcgcaggcgtctggtaagacgtttgagggcgctatgaagaatgttaagggcgccttgggctatcttggtgctacggctatggccccgtttcttaacgggttgaggcagatttttgttgcgttgaatccggttattaagtcggtcacggattcggtgaagccgatgtttgctgccgtcgatgctggtattcagcgtatgatgccgtctattttggcgtggattaatcgtatgccgggcatgattacgagaatgaatgcacagatgcgcgccaaggtggagcagctgaagagcgtttttgcgagaatgcatttgcctgtcccgaaggtgaatttgggtgccatgtttgcgggtggcacagcagtgtttggtgttgtggctgcgggtgtggggaagcttgttgcagggtttgccccgttggcggtgtcgttgaagaatcttctgccgtcgtttggtgctttgaagggtgccgctggcgggcttggcggcgtgtttcgcgccctgggcggccctgtcggtattgtgatcggcttgtttgctgccatgtttgcgacgaacgcccagttccgtgccgcggtgatgcagcttgtggctgtggtgggccaggctttggggcagattatggccgctattcagcccttgtttggtttagtggccggtgttgtggcacagttggcgccagtgttcggccagattatcggtatggttgccggtttggctgcccagattgtgcctttgattagtatgcttgtcgcccggctggttcctgtgattacgcagattattggtgcggtgactcaggttgctgcaatgttgttgccggcgttgatgccggtgcttcaggcggttgtggctgtgatacggcaggttgttggtgttgtgatgcagcttgtgcctgtgttgatgcctgtgattcaacagattttgggtgctgtgatgtctgtgttgccgccgattattggtttgatacggtcgctgataccggtcatcatgtctgttatgcgcgtagtggtgcaggttgtttcggttgtgttgcaggtggttgcccgtattattccggttgtgatgccgattgttacggctgtgatcgggtttgttgcacgtattttgggtgctattgtgtcggctgccgccaggattattggggctgttgcccgtgttgtcggatgggttgtgggccatttcgtgtcgggtttggcgcgtatgggttcggttattcaggctggctggaatcatattagggcttttacgtctgcgtttattaacggtttcaagtcgatcatttctggcggcgtgaacgcggttgtcgggttttttacgcggcttggtttgtcggttgcctcccatgtgaggtctggttttaacgcggcacgtggtgctgtttcttctgcgatgaatgctatccgtagtgtggtgtcttcggtggcgtctgctgttggcgggtttttcgggtcgatggcgtctagggttcggaatggtgctgtgcgcgggtttaacggggcacggagtgcggcctcttctgctatgcatgctatggggtctgccgtgtctaacggtgtgcatagtgtactgggttttttccggaatctgcctggcaatattcggcatgctctcggcaatatggggtccctgttggtgtctgctggccgtgacgtggtgtctggtttgggtaatggtattcggaatgctttgagtggcctgctggatactgtgcgtaatatgggttcccaggtggctaacgctgcgaagtctgtgttgggtattcattccccgtcgagggtgtttcgtgatcaggttggccgtcaggttgttgccggtttggctgaggggatcaccgggaatgctggtttggcgttggatgcgatgtcgggtgttgcttcgcagcttccggatgctgtggatgcccggtttggtgtgcgatcgtctgtgggctcgtttaccccgtacgaccggtatcggcgtgctcagggtgagagtgttgtggtgaatgtgaatggcccgacgtatggtgatcctgccgagtttgcgaagcggattgagcgtcagcagcgtgacgctttgaacgcgttggcttatatgtgagtaaaggggtatgcatgtttattcctgacccgtctgatcgttctggtttgactgtgacatggtctatggatccgcggtttggtgatgagcgtgtgcttcatttgacggattatacggggtcgtctccggtgatgttgttgaatgattcgttgcgcggtttgggtgttcctgaggttgagcatttttctcaaactcatgttggggtgcacgggtcggagtggcgcgggtttaatgtgaagcctcgcgaggtgacgttgccggtgttggtgtcgggtgttgacccggatccggtgggcgggtttcgtgacggttttttgaaagcctatgacgagttgtggtctgcgtttcctcctggcgaggagggggagctgtctgtgaagactcctgccggtgtagagcgtgtgttgaagtgccggtttgattcggtggatgacacgtttacggttgatccggttaatcgtggctatgcgcgttatgtgcttcatttgacggcctatgacccgttttggtatggggatgagcaaaagtttcgtttcagtaacgcaaagttgcaggattggttgggtggcggccctgtcggcaaaaacgggactgcttttccggtggtgttgacgcctggtgttggttcgggttgggataacctgtcgaataagggtgatgtgcctgcgtggcctgtgattcgcgttgaggggccgttggattcgtggtcggtgcagattgatggtttgcgtgtgtcttcggactatcctgtcgaggagtttgattggatcactattgatacggatcctcgtaagcagtctgcgttgttgaacgggtttgaggatgtgatggatcgcctggatgagtgggagtttgcgccgattccgcctggcggttctaagagtatgaatattgagatggttggtttgggtgccattgttgtgtcggtgcagtacaggtttttgagggcgtggtgaattgttgtggctggtcttgtcccgcagataacattgtttacgccagactatcatcgtgtggcgcctatcaatttttttgagtcgctaaaattgtcgttgaagtggaatggtttgtcgacgctggagttggtggtgtctggtgatcattcgaggcttgacgggttgacgaggccgggtgcacgcctggttgttgattatggtggtggccagattttttctgggcctgtgcgtaaagtgcacggggttgggcctcggcggtcttcccgtgtgactatcacttgtgaggatgatattcgcctgttgtggcgtatgttgatgtggcctgttaattatcgccccggtatggtgggttctgagtggcgtgcagaccgggattatgcccactattctggtgcagccgagtctattgctaagcaggtgttgggggataatgcttggcgttttccgcctggtttgttcatgatagaggatgagaagcgtggccgctatattaaggattttcaggtgcggtttcacgtgtttgcggacaagttgttgcctgtcctgtcgtgggctcggatgactgtttcggtgaaccagtttgagaatgcgaagacggatcagcgggggctggtgtttgattgtgttcctgctgtgacgcgtagccatgtgttgacgtccgagtcgggttcgattgtgtcgtgggagtatgtgagggatgcccccaaggctacgtcggtggttgttggtggccgcggcgagggtcgggatcggctgttttgtgaggatgttgattcgatggccgagggggactggtttgatcgtgtcgaggtgtttaaggatgcccgtaacactgattcggataaggtgtctctttacgatgaggcggagcaggtgttgtcggaatcacaggccacgtctggttttaagatcgagttggccgagtcggatgtgttgcgttttgggcccggcaatctgatgcctggggatttgatttatgttgatgtgggttcggggcctattgcggagattgttcggcagattgatgtggagtgtgattcgcctggtgacggctggacgaaggtgacaccggttgcgggggattatgaggataatccgtcggcgttgctagcgcggcgtgttgccggtttggctgccggtgtgcgggatttgcaaaagttttaaaaaagctcaacggattggggtttgttgtgggtattgtgtgcaagggttttgatggtgtgttgaccgagtatgattgggctcaaatgtctggtctgatgggtaatatgccgtcggtgaaaggtccggacgattttcgtgtcggcacgacgattcagggtgccacagtgttgtgtgaggttttgccggggcaagcgtgggctcacggggtgatgtgtacttcgaatagtgttgagacggtgacgggccagctgccgggtcctggcgagacgagatacgactatgttgttctgtcgcgggattgggagcagaatacggcccggttggagattgttcctggggggcgtgcggagcgtgccagtgacgtgttgcgtgccgagcctggcgtgtaccatcagcaactgttggctaccctggtgttgtcgtctaacgggttgcagcagcagctggataggcgtgccgtggcggctagggtggcgtttggggagtctgctgcgtgtgaccctacccctgtggagggtgaccgggtgatggttccttcgggggctgtgtgggctaaccatgctggcgagtggaggctgttgtctccgcgtatcgagacgggttcgaagtcgatcatgtttggtggatctaatgtgtatgcttacacgatcccgtttgatcgccagtttactagtccgcctgttgtggtggcgtctatggggaccgcggctgggggtacgacacagattgatgtgaaagcctacaatattactagtaaggattttggtttggcgtttatcacgaatgacgggtctaaaccgaatggtgtgcccgcggtggctaactggatagctgtgggcgtgtgacggtacaggcgttgtggtggctggtgtgatgttggggggctgccgtgtcgtggatgactcctgcattggtggcttctatttgtaccgcgttggccacggttttgggttctgttcaggctatcacatcccggtctagaaagcgtttgcgaaggttgtctgcgcaggtggatgctttggaagagtatacgtggggtgtgcggcgtgaggttcgccggtttaacgccaggcttcctgacggggttgatccgcttgtgttgcctgagccgcctggttatcggatgatgttgggggtgagtgatgagggagttggaggaggagaagcggcagcgtcgctcgtttgagagggcttccctgctgttgttgtttttgtcgcttgtgctgttgattgtggttgctgggggtgctttgcgtttcggggctgtatcctctgaacgggattctgagcaggcgagggcccagtcgaatggtacagcggccaggggtttagccagccgtgtgcggcaggtgtgtgcccatggtgggatggagtcggtacggcttcaccggtctggtttgtgtgtggatgctgtgcgtacggagcggagtgttcagggtgtgccgggcccggctggtgagcgcggcccgcaaggccctgcaggtgctgatgggcgtgacggtgttaatggttcgtctgggctggttggccctgttggtccgcagggttctcccggcttgaatggcgtgaaaggtcctgacgggttgcctggtgcaaatggatcggatggccgtgatggtgttccgggccgtgcaggtgttgacggcgctgatggtcgggatggttcggctggtgagcgcggtgatgtgggtccttcaggtcctgccggcccgcaaggtgcacagggggaacggggtgagcgtggccccgtcggtgcgaacggatccgatggtaaagatggtaaggatgggcgctcggtggtgtctgtgtactgttctgatggtctcctggttgtgaaatatagtgacggtgtggcttctacaatatcgggctcggtggcctgccagggtgtgaaaccgtcgcctatggtgactatatcatcccacaaatagaaaggagtggctgtgatggtagtgtttggtggtggtgtgtggtgaggtttatcccagcagcgcaccattctgccggttcgaatagtccggtgaatagggttgtgattcatgcgacgtgcccggatgtggggtttccgtccgcctcacgtagggggagggctgtttctacggcaaactattttgcttccccatcgtctgggggttctgcccattatgtgtgcgatattagtgagacggtgcaatgtctgtctgagtctacgattggttggcatgccccgcctaaccctcatagtttgggtatagagatttgcgcggatggtggctcgcacgcctcgttcagggtgccggggcatgcttacactcgtgagcagtggcttgaccctcgcgtgtggcccgcggtggagcgtgccgcgatcctgtgtagacgtttgtgtgacaaatataatgttccgaaaaggaagcttagtgcagccgatttgaaggctggcaggcggggtgtttgcggccacgtggatgttacggatgcgtggcatcagtcggatcatgacgatcctgggccgtggtttccgtgggacaaatttatggccgtagtctgcggcggtagtggtagtgaggagttaactgtggctgatgtgaaagccttgcatgatcagattaaacaattgtctgcccagcttactggttcggtgaataagctgcaccatgatgttggtgtggtacaggtacagaatggtgatttgggtaaacgtgttgatgccttgtcgtgggtgaagaatccggtgacggggaagttgtggcgcacgaaggatgctttgtggagtgtctggtattacgtgttggagtgtcgcagccgcattgacaggcttgagtctactgttaacggtttgaaaaagtgatggtggtttgttgtgggtaaacagttttggttaggtttactggagcgggccctgaaaacttttattcaaacgtttgttgccgtgctcggtgttactgcgggtgtcacgtatactgcggagtcgtttcgcggtttgccgtgggagtcggcgttgatcacagccacggttgctgcggtgttgtcggttgctacttcgtttggtaatccgacgtttgtggctggtaagccgaagactacggttgtggataccgggcttgttccacccgatgataccggtttgatagaaccgcatgcggtggatgtgtcggatcctggcatgattgagccgatggatgatgcggatgttgccggctatgtgccgaagcgggctgccgagtcggaggttggcacagtagagtctactgttgcataattgaatatgtgtgtgccccagcggtgctgccacgattgtgtggtggttgccgctggggcacactttttgtttatgcgatatggctatgattcgttgctgtcgatggtgtcttcgagcatctgatacaggtggaggcaggtgcagatggtttcgctggcctggtcgagaacgtttcggccgataacgtttttgtggttgtcgcggtggcggatgatagcccacatgatctcgtcggctgccgcctgtaatagttttgcctggtatgcgattccggcgagccagtctagtgcttcctggcttgcctgtgtgtcgtctggaataccacgggtgttgctgttgcttgggtgtccttcactgtcgcatagccacaggatttcgctgcactcgtctagcgtgtcctggtcgatagcgagatcgtcgaggctgacattgttgacggtaaggttcacgttgtcgagggagatgggtacaccgtactggttttcgacactgtcaacaatgttttgtagttgttgcatgttggtgggctgttgttggatgatacggtgtaccgctgctttgagggcagtgtaggggatattgtgtgtgttgttcatggttttatttcatccctgtgctgtcgtcgttatcgtctggatagtatctactgtttgcgtaccctgttagggtgatcaatgtttggtctgcccactgtttcacggtttgccgggttacccctaatcgttgggctgctaccgaataggtttgatcatacccgtatacttcccggaatgctgccaaccgtgctaggtgttttcgctgtttggatggctggcaggtgagggtgtagtcgtcgatggccagctggaggtcgatcatggagacgatgttgttgccgtgatgctggggggcggttggtgggggtggcataccgggttctactgatggtttccatgggccgccgttccagatccattgggcggcttggataatatctgcggtggtgtaagtccggttcactggtcaccccctgaacaggttgtcgaggttgtctgggttactggtgttggtggtgtcgaatcgtcccacacagtggcagtagtcgtacatgagtttgataatgtgttggtggtcgccgaggtaggtgttgccactaatactgtaggtggctgtgccgtctttgccgataatgtatttggcggtgatggtttctggtgtttcggtgttggtgatgattgctgttgtggtggtgcctacggtttgtagcctggtggtttgggttccgtcgtcgagggtggtggtaaccataattggggttttccttaaatgcttgtctggttgtcggctagatgaataatatcggataaaggtttcggctggtctaggtgctgtaccgctttgttggctaaacgtttggctaccctgtaacacattttggtatagtgtttgttgtctaggttgtggtattgttcccgcaccgcaatatatagtagggagtcttggtacaggtcgtctgcactgattgcggggtagtgggtggctactttgatgcatgaccggttgagtgtgcgaagatgatggtcggtggtccatccccacgatgcggtggtggcccggtctgcttttgttggtcgtctactcatggcactatttcatctcgctatctggtagttgtttggtgttttatggttgatagtgtagcacacgagtccggggttgccggtggtgcccgtcttgtgccggtaccatgtggattcgccttccatggatgggcattggatgaaggtgcgttgtccttgctcggagatttctaggtggtgtcggtgcccggccatgaggatgtgggatgtggttccgttgtggaattcttgtccgcgccaccaatcatagtgtttgccggtgcgccattggtgtccgtgggcgtgcaggatttgtgtgcctgccacattgacggtggtggtcatttcgtctcggctggggaagtggaagtgtaggttggggtattggttgttgagttggtaggcttcggcgatggcgcggcagcagtccacgtcgaaggagtcgtcgtaggtggtgacgcctttgccgaagcgcacggcttcaccgtggttgccggggatggatgtgaccgttaggttggcgcagtggtcgaattggtggatgagttgcatcatggccatgcgggtgagccggatttgttcggtgaggggtgtttgtgtgcgccaggcgttgttgcctccttgtgacacgtatccttcgatcatgtcgccgaggaatgcgatgtggactcgttgcggtttgcctgcctgttgccagtagtgttttgcgactatgagggagtgcaaatagtcgtcggcgaagtgtgctgtttctcctccggggatgcctttgccgatttggaagtctcctgccccgatgacgaaggccgcagtgctgtagtcggtgcgggtgtcttgttcgggttttggtggctgccattcggctagtttatctacgagttcgtctacagggtaggggtttgttgcgggttggtggtcgatgattttttgtacggatcggccggtttctccgttcggtaaggtccattcggagatgcgtgtgcggcgtacagtaccattggctagattgtcgtcgatggtgtcgatggcgttgtcgtggttggctagctgtgtgagtagccggtctatattgtctatcactgggtatcctcttcctcgtgtggggtggtgttggcttgtttgcggcgatagtctttaataacggtggcggagatggggtatccggcttgggtgagctgttttgctagccatgaggcggggatggttttgtcggcgaggacgtctgcggctttgttgccgtagcgttggataagggtttcagttttggttgccatgatatcctaggggttgtgtggcgggttgccatcctgtgcggcagtcgccgtcgtgtcctggcttacgggtgcaccatgtgatggttccgtctgtgtggtggagttttttgccgcacatgacgttttgtagatgctccggcagctggtcggtgttgttgctggtttgtatgtcgaagagtgttttctggttggtgaaatgctctgacacggtgccattatgcacgggtagtatccatgttttccattgctgttgtagcctggtgttccagtggaattgtttggcggcgttttcggcctgttttaaggttttgtagtagccgactagtatgcgctggtgttcactgtcgggtgggttttggcctcgccaatattgtgccgccacggcgtagcggttgctggctgtgaaggcgtcccagcagtattcgataatgtgttgtagtgcactatcgggcatgtcttgtatttggttttcgttaagccattcttcaacaaggatgttgtgtatggcgcgtttgtctttgatggttggtttgaacgagatgctcacgatagtaccggctggtcgtcttgcatgaactggttgaaggtgttgtttccggcgtgttgggcttgtgtgatgtcctggtcggtccagtcggggtgttgctgtttcagatagtgccagtggcacgcattgtaggtttcgtcttgtagccgtgtgagatggttttcggtgatgatttgtttccacattgtccatgacacgtcgagccggttgaggatttcgagggctgggatgttaaattggttgaggaagagtatttcgtgggtgtagtagtttttctcgtaggcgtcccatccgcttcggtgcctgttgggctggtttttggggtaggcttcccggcatactttgtgcaaatgtttggccatgtcgtcgggtagtttaatgtcggggttggcgcggatcatggatcgcataccatcataggtggtgccccaggtgtgcataatgtaggtggggttttctccatcagcccatttttctgcacagatggcgaggcggatgcgcctcctggctgcttggctaatgttgcgccggttggggatggggcacgtgtctaggggatccatgatgttttagtgtacctttctttgtttgggttgcttgtgtggttttattgtagcactgtgttgagtgcttgtgtcaaccctgttttgccggcctgaaggtaggtgtctgtgacatcccccagggtgaggggcacgtgtacggcttgggggagtgctgtttggagggtttgggccatcttgtctcccgcggggtcgggatcggaccagatgtaaacatggtcgtagccttcgaagaatttggtccaaaagttttgccacgaggttgcgccgggtatggcgacggccgaccatccgcattgttcgaggatcatggagtcgaattcgccttcgcaaatgtgcatttcggctgccgggttggccatggcggccatgttgtagatggagcccgtgtctccggccggggttaagtatttggggtggttgtgttctttgcagtcgtgtgggagtgagcagcggaaacgcatttttcttatttcggctggccgcccccaaacggggtacatgtaggggatggtgatgcactggttgtagtcttcgtggcctgggatggggtcattgtcgatgtatccaaggtggtggtagcgggctgtttcttcgctgatgcctcttgctgagagaaggtcgagaatgttttcgaggtgggtttcgtagagggccgaggctttctggattcggcggcgttccgcaatgttgtatgggcgtatgctgtcgtacattcgggtttctttcttcgagttgttgttgtagtttggcgaggccgcctccgacaccgcatgtgtggcagtaccagacgcccttgtcgaggttgatgctcatggagggttggtggtcgtcgtggaacgggcagaggatgtgttgctcgttcctggacgggttgtagcgtatccggtaggtgtcgaggaggcggcaggtgtcagaggtgtgggaggagttctgcgagggttgataccacataggcttcgctccatggcttgttgcgctgtttcatgaccactaacccgattgtggatttgtcaaccaggttgcggtgggtttcatagttgcgcgcctcccggctggcttgtttcacgaattgggcgagatgttgctgtcctgctttcgcttcgatcacataggttttgtggccggttgtgaggatgaggtcgccttcgtcttcgtggccgttgaggtgtagccgttcgatgtcgtgtccgatgtcacgtagctggtgcaataatcgtgtttcccactcggcaccggcccggcggttgcgtgattgctgtgtagccatcataatcctttgtgtgttgtggccatgttccatggctgtttttcggctagtggtccgaagaatgtgtattcggggtaggctcgtagccgttcgtatcgggtgccgtctgggctggatttgcctgtgcgctgtttcaacactgcgatgcgcgcctctgccggtatcgatagcccgttgccgttatcctcgccaccatacaatgagactccgaggatgagttgtggtttctcggatagcccgtttttgatctctcgtctggcgggcgggtgttcgatgtcggagccggttttgtcggttgcgtggtgtgtgacgataatggtggagccagtatccctacctaatgctgtgatccattgcatggcttcttgctgtgcctggtagtcactctcgcagtcttggatgtccatcaggttgtcgataacaatgagtggtgggaaggtgttccacatttccatgtaggcttgcagctccatggtgatgtctgtccatgtgatgggtgactggaatgagaatgtgatgtgttggccgtggtggatgctgcctcgatagtattctggcccgtagtcgtcgatgttgtgttgtatttgggcggttgtgtgttgggtgttgagggatatgattcgtgtggaggcctcccagggtgtcatgtcccctgaaatatatagggcgggctggttgagcatcgcggtgatgaacattgctagcccggatttttggctgccggaccgccccgcaatcatgacgagatcccctttgtggatgtgcatgtcttggttgcggtagaggggttctagttgtggtatacggggcagctcagcagcggtttgggaggctctctcgaaggatcgttgtagagagagcatcgggaccttaatctatctatctgttacggtttggatgaatattggcggtcagatggagtcgatatctacatcatcgctgccggtggtgttgggctggctgtctcgctggtcaacgtaggcggctacaaggtcgtagatggcgtcgtctaggggtttgaggatgacagcgttgaacccgtttttagtgcgcactgtggcgagtttgaaggcctgctcctcgccgaggtaggtttcgagttcgcggatcatggagtgtgggcggtcgttgttgcctcgcgctttttcgatgatagcgttggggatggtttctggggtgccgttgttgaggtcgtcgagggtgtggaagatagtaacgtcggcgtaaatacggtctgcgacctgtccgccgtagccttcggtgttgtgttccacgtcgtggattttgaaggcgatggcggtggcgtcctggtttttggacgggttgaagaaggtgctgctgttgctgttgttgcggtagttggcgagtcccataacttttgtccttttgctgtttgtgttgttttgttgtcttatattggtttatcgggtgaggctgtttcgtttagtgcggaacgcctcagacacgtcactgttactggtgatgatctttttgtactgtttcaagaggtctgctaattgtgctttactggtggctttgttgatcctgtcgatgataatgtcgttttcttgattggcgattttgttgacgtagtctttggctgctttgtcgtatcggtcttggaggatgatggatgcgctcgctacgagcgttgccagatcccagtctttggagactgtttcgtctttgagtccgcctagcaggtcgatgatggcctgttttgtctgctctgctgtgtctcctcggatgaccgcccatggtgcagcatagtctccaccatatttgagtgtgatagtgagtcgatcattgtctgtggtgcgctcttctgtcacttgttttccttttctttattgtctgcttggggtggctgtacggtggattctaccgggtatctgtaggcgtctttcccgtctaccgcccagcaggcgtcctgtacggggcatcctttacagagtgctgtaacatgtgggacgaagatgcctttgctgattcctttcattgcttgactgtacatggatgatacatgccggtaggtattgttgtcaagatcgtacagttcggttgctgtgccctgagtttgcgatgtggtgttgtttcggctgctggcgggtgtccaaaacatgcctttcgtcacgttgatgtcgtgttggttgagcatgtaccggtaggtgtgcaactgcatggcatcaacagggaggcgacccgttttgaggtcgagaataaacgtctcaccagtgtcggtgtcggtgaagatacggtcgatgtagccaacaatctttgtgccgtcctggagggtggtttcgactgggtattcgatgcctggctggccgtcgagtattgctgtgtggtattgtggatagtttgtgcgccactgtttccacctgtcgacgaagatggggccatagatcatccaccagtcgtagtctttcttgtgtggcccgcctgactcgcacatgtttttgcacactctgccggagggtttgatttctgtgccttcggattcgacgagggcaacttgggtgtcgaaaacgtttttgaaggatgagagtttgtctggcagtgcagggtattcgtcggggttgtacaggtggaggtcgtactgttcggtgatgtggtgtatggcgcttccggcgatggttgcgtaccaggtgtggtgttgtgcatgatagccgtgggataggcgccatttttctccgcattcggcccactgggtgagtgaactgtaggagatgtggcctggatggttgatggttttcggatattgtgctagaggcattacttgtcgcttttgttccatgggttgcgggtgtcttggccggcattgtgttgctggtaggcgaggagtgctaggcagtgccaggctgcgtgtgccaggtgtggcaggtgtgattcatcgtcgaggttgtttccttgctgccaggatagcacatggcggtagagggcgtcgacactgtgacaccaggggtatcctccggtccagttgttgtcgccgtatttggtggcaccgtagcctgctacttcgcctagggcgtgcaaggctacggggtcaatgagggagagcctgcagagtttgagttcttttcgggcacctgtgtcggggtcggtgtacatgcgggtgggctcatccatggggggtgtgtgcctttcttggtttgggttactggttgttgtcgtgggctagtgctactgcgagaataatgatggcgagggtttcagcaataagtatgggtgttgtgatcatttgctgtctcggggattgttggtgagggttgaggcacccaggagggtggcgagggcgcatgcggcgataatggcgagggctgccttgtggggggtgccggttgcgtacatccatgtgatgatgccgccttggatccatgccagtgtggtgaagaaggtttcgtaactgtgcaactcgatactgttgggtgtgttcatgctcgctcctgaagaatggtgttgatggttttgtaaatgttgtacaggtcggtttcgatagataacagttggtggatttggtggtcgaggttgatatctgggttgagggtgttgatgcgggatgcgatgtcggtggctgtgcgtagtgtgccgccggtgtggtgaataatgtgtgcggtgtcggcgagtccggtggtgacagcatagtgggagaggagaggcatagcggggatgctccttggcgggttactgttgcgggttgatgttgaggtcggtgacgtgcgggtggtcttctgttcctgtgatgaggcagtggacggtgactgggagtttggatgcgccgggctgtttcatggttgcgccgtagacgatgctgaacgtgtctttaccgatggttttgtggagttggaggtcgatgtcggggttgccgttccagttgacgccgtgtgcggcggccttctgttcggctttacggttgcaggtgtgtgctgcggtgatcatggtgagaccctgcgcggtttcttcaccccttgcttgggcttgcttgtgggttttggcttgttcggcttgtagggagcgggtggcggctgcctgccgtgccgctttctcggctttgcgctgttgggcggtttttggtgtccattctgtgttggctgtggttacctgtggtgcgggttgtgatgcgagtggggggttgtcgtcgggggctgggaggaaggatgcggcggcgatgatggcggctgtgattccggcgatggtgtagccgtttttcttgttcatgactgttatcccctttccggggtgttgttcgttgctgacatgattgatacttccagacggggctatgactgtcaaggtgtcgctcagtttgtgtgagcgatccttgtgtggctgggggttatcgggcgaacagggtgagtaggtgtcctaagttgatgcgactcacgttccagtagagttgcgtggcttcaccgcccgtgagcggcttccacttgttgtggctgaacactgtaccgtcggatgctatgaacgtgtcggggcgtagcttgtgaagttcagtctctacgctctgccggtaggcttcggcgaggccctcaaaatccatgtggtcaccggagaggttttcgaggcgtgtcaggtcgaagggtgtggggcagtcgtagctggcgggggtgtagagctgggtgaagtggtcggcgatcttttgcatcatgattccttttctagtgtggtgggttaatagttttatcgggtggatgcgacaaggatggcgtctatgtcgatcatgtcgatgagatcgtggagttcctcggcctcattctcagataggtggcgccagtcgtagtcgccgtacacggcgccgtcgagggtgacagtccacaggggccggatgagccgtatggcttcttgtactttggcgtggtacatgcggcgcaccatatccagatcgatgtcgtctgaatggtttccggtgaggctgtggagactgagggggtcgatttctgtctgctggtagaggctggtgaaggatggggtgatgagtgtgccatccatgggggggggtgctcctttctggattgtttgggttggttgttgtggtttctaggatgtgtaggttgcgacccacagtcaaggctgcgctcaatccgaatgagcgtttagcgtgtgtggcatgggatgtggcgtatctcacttaagccttccttgcctctctaggcgtctcaaatcttctgggggtaggattatatagggttgaccctgctgatcgattctagagcccttctagggcctctcgggggtatgtctgagtgatgacgggtgtggcagatgatctagcgagtcaaggtgccgagcttagacataaaatctatcatctaggtgtgtgagatgtatcacatcctcctggcttggtgtgcactttcaaggctactctgtcgatctgacgtggagggtgtagcccagaaataccgtttaaagccactgggagacgcctagaagcgccttacggggtgggggctaggtatttatacccccagcatattctgatcgattctagacgcctacagaagcctggtacacgatcagctatccagacgcagaccatcagcccctatcccgcttagctaagcctgcactatgtggacattgttggatactgtagaggaaagaaggacacggtaaaggaaagagggggaatcagtcttagggtcttaggtacttcagttcaccttaggggcttagcgctgagcacttagcgctaagcccctcaagggctcggcatcagcctgacaggcttagcccatactgcacagccctgaaaggagtacacgccatcagggaaggcttgagagtacgaggagcctcagcgacgagtactcgaaagcctgagggaacacctttagcactgatgggcctagcgcgttcggaaagaacacagaagtaaagtgtgacagctgtccgggagtgaaccccgttctggctaggggtttcagtcttaactacctgtaaaggttacaagactctaagaaaatttaagaaaattcttaagaagaaagttgtgttgttatcccccaaaaaacacccgtttacacccctcaaacccgcctatagagccaaatccgccagtttgactcgtcccaggtggcgtatgctaggctggacaggtagccagctggacgcgaggccagaaagtgctgacgcacttcccgacctcgcttaccatcagtctaccaaacactttaaagcttcaaggctaagccactcagtgctaagcccttaagacctcaacgcttagcaccgagcccttgaggggctcagcattagcactaaggcttaaacacttaataatttaagtaaacataaaagcttttaagacttaaagtaaatatataaccttaacagttaaacgtttaaagctttaaaccttaacacctaagttaggtataaaaccttaaaggcttagcacttaaggatataaacttaacatcagtgtttaagactttaaaacttaaagtaactataagacttaaagacttataagctttaatacttatataataataaagtttaagactgatggttaactttaagtgtttaaagtcttatagttactttaagttttaaagcttataagttataaaagttttagaagagctaaggggttaacttctttacttctctactctctttggttctttctctcttctcttcttttcttcatcaggggagaagaggaacctttaccatcagcgctgatgggctttcacggtgtgtctcgtgtgtctctggtcgcaagctcccatcgcaccctcgccacccctcaccttgaccgtgtctcctttacagcttggtgtgttcggctgaaggcgtacggcgtgtcacgctaacacccttaacaccaggtaagacttaaagtgtatattatatgtagaagactttaaaaactttgaggatgtacacgttttggctgtgacctacaccgctaggcgctaggccttgaaacgcgaacacaccctcccccatttttcttccgtgtccttcttcttttgacacagctggggggcgatgtgatctttctcacatgcaggggtggagggtagaaaacaaccaccccaccacaaacagaacaccccaccaaacgaacaaaacagggcctagaatcgaccagcagggcaagggcaaggtattcatacccccaacgcatttcaggctgttacagaggcaatcagaggcttacagggaccataggtgaacgggaggcgcgatggcacacaccaaccgcaccgcatccgccgcccaccggcgctggcggcaacgactcatcacccaagcccgacaacaaggccaaaccgaatgtcccttgtgtggagccaccatcacctgggacacacacgacctaccaaccagccccgaagccgaccacatcacacctgtcagcaggggaggactcaacaccctcgacaacggccaaatcatctgcagaacatgcaacagaagcaaaggcaacagaacacaaccaaacattcgattccaacaacaaaccacaaaaacattgattccatggtgacaaaccccacaacccccaccggggacaccccctgcacacccgtgcaagacc

SEQ ID NO: 45 - DNA, 29443 bp, Bacteriophage of P. acnes
agtgaaatacctcccttttgtggatttatctgtttgtcgactttttgtgttggtggtgagtgttgtgcagcctgagcttcctgggtctcgtgattggtgtggggagacgcttcgctggtggcgtgtgtggggtgaggatagtcgcgcatcgtacgtgtcggatgaggagtggctgtttctcatggatgctgcggtgattcatgattgtgtgtggcgtgagggccgggctgaccttgtggcttcgcttcgtgctcatgtgaaggcttttatgggcatgttggatcgttattcggttgatgtggcgtctggtggccgtggtgggggttctgcggtggcgatgattgaccggtatcggaagcgcaagggggcctgattaggtgtctggtgttgttgggtctcaggtgcctcgtcaccgtgtggctgcggcgtattcggtgactgccggcggggatgctggggaattgggtcgtgcgtatgggttgatgcctgatccgtggcagcagcaggtgttggatgattggcttgctgtcggtggtaatggcaggcttgcttctggtgtgtgtggggtgtttgttccgcggcagaatggcaagaatgctattttggagattgtggagttgtttaaggcgactattcagggtcgccgtattttgcatacggctcacgagttgaagtcggctcgtaaggcgtttatgcgtttgaggtcgttttttgagaatgagcggcagtttcctgacttgtatcgtatggtgaagtcgattcgtgcgacgaatggtcaggaggctattgtgttgcatcatccggattgtgccacgtttgagcgtaagtgtggctgtccgggttggggttcggttgagtttgtggcccgttctcgtggttctgctcgcgggtttacggttgatgatttggtgtgtgatgaggctcaggagttgtcggatgagcagttggaggctttgcttcctaccgtgagcgctgcaccgtctggtgatcctcagcagattttccttggtaccccgccggggcctttggctgacggtagcgtggtgttgcgtcttcgcgggcaggctttgtcgggtggtaaaaggattgcgtggacggagttttcgattcctgacgagacggttccggatgatctatcgaggtcgtggcggaagttggctggggatacgaatcctgcgctgggtcgccgcctgaatttcgggacggtgagcgatgagcatgagtcgatgtcggctgccgggtttgctcgggagaggcttggctggtgggatcgtggccagtcggctacgtctgtgataccggccgataagtgggctcagtctgctgtggatgaggcgagtctggttggcgggaaagtgtttggtatctctttttcgcgatcaggcaatagggttgctttggctggtgccggcaggactgatgctggtgttcatgttgaggttattgatggcctgtcggggacgattgtggatggtgtaggccagctggctgactggttggcgttgcgttggggtgacacggaaaagatcatggttgccggttcgggtgctgtgttgttgcagaaggctttgactgatcgtggtgttccgggtcggggtgttgtggttgccgatactggggtgtatgtggaggcgtgtcaagcctttctggaaggcgtaaggtctgggagtgtttctcatcctcgtgctgattctcgccgtgacatgttggatattgctgtaaggtcggcggttcagaaacataaaggctctgcgtggggttggggttccacatttaaggacggttctgaggttcctttggaggctgtgtcgctggcgtattttggtgcgaaaacagttaaagcgaagcggcgtgagcgtagtggtaggaagcgggtgtctgtggtatgaactcggatgagttggctctgattgagggcatgtttgatcgtattaagagtttgtcttcgtggcattgtcgcattgagggctactatgagggttctagccgggtgcgtgatttgggggtagctattcccccggagttgcagcgtgtgcagactgtggtgtcgtggcctgggattgcggtggatgctttggaggagcgtctggattggctgggctggactaatggtgacggctacggcctggatggtgtgtatgctgcgaatcggcttgctacggcgtcgtgtgatgtgcatttggatgcgctgatttttggtttgtcgtttgtggctatcattcctcatggtgatggttcggtgtcggttcgtccgcagtcaccaaagaattgtactggccggttttctgccgatgggtctcgtctggatgctggccttgtggtgcagcagacgtgtgatcctgaggttgttgaggcggagttgttgcttcctgatgtgattgttcaggttgagcggcggggttcgcgtgaatgggttgaggtggatcgtataccgaatgtgttgggtgctgttccgcttgtgcctattgtgaatcgtcgccgtacttctaggattgatggccgttcggagattacgaggtctattagggcttacacggatgaggctgtgcgcacactgttggggcagtctgtgaatcgtgatttttatgcgtatcctcagcgttgggtgactggcgtgagcgcggatgagttttcgcagcctggctgggtcctgtcgatggcttctgtgtgggctgtcgataaggatgatgatggggacactccgaatgtggggtcgtttcctgtcaattcgcctacaccgtattcggatcagatgagactgttggcgcagttgacggctggtgaggcggctgttccggaacgctatttcgggtttatcacgtctaacccgcctagtggggaggctttggcggccgaggaatctcggcttgtgaagcgtgctgagcggcgccaaacgtcgtttggtcagggctggctgtcggttggtttcctggctgccaagtcgcttgattcttccgttaacgaagctgatttttttggtgatgttggtttgcgttggcgtgatgcatcaacacctactcgggcggctacagcggatgctgtgacgaagctggttggtgccggtattttgcctgctgattctcgcacggtgttggagatgctggggcttgatgatgtgcaggttgaggctgtgatgcggcatcgcgccgaatctgcggatccgttggctgcgcttgctggggctatttcccgtcaaacgaacgaggtttgatggatggcttcgggtgctatgtcgaggctggctgcgactgagtatcagcgtgaggcggtcaggtttgctgggaagtatgcgggctattattctgagcttggccgtttgtggcgtgccggcaggatgagtgacacacagtatgttcgtttgtgtgtggagttggagcgtgccggccatgatggttcggcgtcgttggccgccaggtttgtgtcggattttcggaagcttaacggtgtcgatcctggtttgattgtgtatgacgagtttgatgctgccgcggctttggctaggtcgttttcgactatgaagattatgaatagtgacccggatcgggcgaatgatacgattgatgcgatggcggcgggttttgatcgggctgtcatgaatgctggtcgtgacacggttgagtggtctgcgggtgcgcagggtaggtcgtggcgtcgtgtcacggatggggatccgtgtgctttttgtgccatgttggctacgaggtcggattatacgactaaggaaagggcgctcactactggtcatacgcggcgtcataagcgtggtggtaagcgtccgtttggttcgaagtatcatgatcattgtgggtgtacggtggttgaggttgttggcccttgggaaccgaatagggctgatgccgagtatcagaggacgtatgagaaggctcgcgagtgggttgatgatcatgggttgcagcagtcgcctggcaatattttgaaggctatgcgtactgttggtggcatgagataatttgatgtggtttccggttgtgcgccgccggttatcggtgcacagggttgtctcccgcacgggggtcaacaatgttgtgttgttttccgcaaggagtgtagggttaggctatggccgatcagagtgttgaggaacagaatgttgacaatgatgttgtggagtccggaaagggtgacggcattgttgacacggtgaagggcgatcaaggcaaacaggttgaagatcagtcgaagaatgaaggcgagggtaaatcgccggggactgattggaaggctgaggctcgtaaatgggagtctcgtgcgaaaagtaatttttccgagctggagaagcttcgtacatcgagtgacgattctggatctactattgatgagcttcgccgcaagaatgaggaactcgaagacaggatcaacgggtttgttcttgagggtgtgaagcgtgatgtggctgccgagtgtggcctttcgggtgatgctgtcgcttttctgcacggcgacgatcgtgaagcgctggtggagtctgctaaggctttgaagggtttgatcgaccatagtagtggtggcgcgggtgtgcgccgtcttgcggggagtgcccccgttgatgatgttaaacgacgtgagggtgtcgcgtttgtggatgctcttgtcaataattctaggagatgatttgtgatggctgacgattttctttctgcagggaagcttgagcttcctggttctatgattggtgcggttcgtgaccgtgctatcgattctggtgttttggcgaagctgtcgccggagcagccgactatttttggccctgtgaagggtgccgtgtttagtggtgttcctcgcgctaagattgttggtgagggtgaggttaagccttccgcgtctgttgatgtttcggcgtttactgcgcagcctatcaaggttgtgactcagcagcgtgtttcggacgagtttatgtgggctgatgctgattaccgtctgggtgttttgcaggatctgatttccccggctcttggtgcttcgattggtcgcgctgttgatctgattgctttccatggtattgatccggctacgggtaagcctgctgcggctgtgaagacttcgctggataagacgaagcatgttgttgatgccacggattctgccacgactgatctggtcaaggcggtcggcctgattgctggtgctggtttgcaggttcctaacggtgtcgccctggatccggcgttctcgtttgctctgtcgactgaggtgtatccgaaggggtctccgcttgccggtcagccgatgtatcctgccgccgggttcgctggtttggataattggcgcggcctgaatgttggtgcttcttcgactgtttcgggtgccccggagatgtcgcctgcctctggtgtgaaggctattgttggtgatttctctcgtgtccattgggggttccagcgtaacttcccgatcgagctgatcgagtatggtgacccggatcagactggccgcgaccttaagggccacaatgaggttatggttcgcgccgaggctgtcctgtatgtggctatcgagtcgcttgactcgtttgctgttgtgaaggagaaggcttccccgaagcctaatccgccggccgagaactgatttatttgttgcgataatgttcatgctgtgtgcagggggtggtgttgatgggtatcattttgaggcctgaggatattgagcctttcgccgatattcctaaagataagcttgaggcgatgattgccgatgtggaggctgttgctgtcagtgtcgccccctgtatcgctaaaccggatttcaaatacaaggatgctgctaaggctatcctacgtagggctttgctgcgctggaatgatactggtgtttctgggcaggttcagtatgagtctgcgggcccgtttgctcagactacacggtctagtactcccacgaacttgttgtggccttccgagattgccgcgttgaagaagctgtgtgagggtgatggtggggctggtaaagcgttcactatcacaccgaccatgaggagtagtgtgaatcattctgaggtgtgttccacggtgtggggtgagggttgctcgtgcgggtcgaatattaacggctacgctggccctttgtgggagatatgatatgaccagttttccttacggtgaaacggttgtgatgcttcagccgactgttcgtgtcgatgatttgggcgacaaggttgaggattggggtcatcctgtagaaaccgtgtaccataacgtggctatctatgcttccgtttcgcaggaggatgaggccgcggggcgtgattctgattatgagcattggtcgatgcttttcaagcagcctgttgtgggcgctgattatcgttgtaggtggcgtattcggggtgtggtgtgggaggctgacgggtctcctattgtgtggcatcacccaatgtctggctgggatgctggtacgcaggttaatgtgaagcgtaagaagggctgatggttgtggcacgtgatgtgaatgtgaagcttaatcttcctggtatccgtgaggtgttgaagtcttctggggtgcagggcatgttggcggagcgtggcgagcgtgtcaagcatgcggcctctgctaatgttggcggtaatgcttttgatagggcccagtatcgtgccgggttgtcgtcggaggtgcaggttcaccgtgttgaggctgtcgctaggattggcaccacctataagggtggtaagcgtattgaggcgaagcatggcacgttggctaggtcgattggggctgcgtcgtgatcgtttacggtgatccgcgaatatgggcgaaacgcgtgctcaaggatgatggctggctgtccgatataccgtgtacaggtactgtcccggatgatttcacgggtgacttgatttggttggcgttggatggtggcccgcagttgcatgttcgtgagcgtgtttttttgcgggtgaatgtgttttctgatatgccggatcgtgctatgtctttggcgcgtcgtgttgaggctgtgctggctgatggtgttgatggtgatccggtggtgttttgtaggcgttctactggtcctgatttgttggttgatggtgcacgttttgatgtgtattcgctgtttgagctggtgtgccgtcctgtcgaatccgagtaaacgtatttgttttctatattttgtttttgtttgattatttttgggggttgtgatggctgctacacgtaaagcgtctaatgttcgctctgctgttacgggtgacgtctatattggtaaagctcatgccggtgacactattgatggtgtgaagacggttcctgacggtcttaccgctttagggtatctgtctgatgacgggtttaagattaagccggagcgtaaaacggatgatttgaaggcttggcagaatgcggatgttgttcgcactgtggctacggagtcgtctatcgagatttctttccagctgatcgagtctaagaaggaggttatcgaactgttttggcagtcgaaggttactgccggagccgattcgggttcgttcgatatttctcctggtgccacgacgggtgttcatgccctgttgatggatattattgatggcgatcaggttattcgctactatttccctgaggttgagttgattgatcgtgacgagattaagggtaagaatggcgaggtgtacgggtatggtgtgacgttgaaggcgtatcctgcccagattaataagaatggtgatgcggtgtcgggtcgggggtggatgacggctttaaaagctgatactcctccgactcctcctccggccccgaagcctccgaagcctgagccggatccgaatccgccgtctaataactgatacacatagtttgagggattgttgatagatgagtgacacaggttacacgttgaagattggtgaccgtagctgggtgttggcggatgcggaggaaacggcgcaggctgttcctgcccgcgttttccgtcgtgccgccaggattgcccagtcgggggagtctgcggatttcgcccaggttgaggtgatgttttctatgttggaggctgccgccccagaggatgctgtggaggccttggaggggcttcctatggttcgtgtggccgagattttccgccagtggatggaatataagcctgaaggtaagggtgcctcgctgggggaatagtttggctccacggcctgattgatgattatcgtggggccatcgaatacgatttccgcactaaatttggtgtttctgtttatagtgttggtggcccgcagatgtgttggggtgaggctgtccggctggctggcgtgttgtgtaccgatacgtctagccagttggcggcccacctgaatggttggcagcgcccgtttgagtggtgtgagtgggctgtgctggacatgttggatcattacaggtctgctaatagtgaggggcagccggagcctgtggcgaggcctacggatgagcgtagggcccggtttacgtctgggcaggtggacgatattttggcgcgtgttcgtgccggcggcggggtgtctcgcgagattaatattatggggtgaatagtgtatgtctggtgagattgcttccgcatatgtgtcgttgtatacgaagatgcctggccttaaaagtgatgttggtaaacagctttctggggttatgcctgctgagggtcagcgttcgggtagtctttttgctaagggcatgaagttggctcttggtggcgccgcaatggtgggtgctatcaatgttgctaagaagggcctcaagtcgatttatgatgtgactattggtggcggtatagctagggcgatggctatcgatgaggctcaggctaaactgactggtttgggtcatacgtcttctgacacgtcttcgattatgaattcggctattgaggctgtgactggtacgtcgtatgcgttgggtgatgcggcttctactgctgccgcgttgtctgcttcgggtgtgcagtctggcgggcagatgacggatgtgttgaagactatcgccgatgtgtcttatatttcgggtaagtcgtttcaggatacgggcgctatttttacgtctgtgatggctcgcggtaagttgcagggcgatgacatgttgcagcttacgatggcgggtgttcctgtgctgtctttgcttgccaggcagacgggtaaaacctcggctgaggtgtcgcagatggtgtcgaaggggcagattgattttaacacgtttgcggctgcgatgaagcttggcatgggtggtgctgcgcaggcgtctggtaagacgtttgagggcgctatgaagaatgttaagggcgccttgggctatcttggtgctacggctatggccccgtttcttaacgggttgaggcagatttttgttgcgttgaatccggttattaagtcggtcacggattcggtgaagccgatgtttgctgccgtcgatgctggtattcagcgtatgatgccgtctattttggcgtggattaatcgtatgccgggcatgattacgagaatgaatgcacagatgcgcgccaaggtggagcagctgaagagcgtttttgcgagaatgcatttgcctgtcccgaaggtgaatttgggtgccatgtttgcgggtggcacagcagtgtttggtgttgtggctgcgggtgtggggaagcttgttgcagggtttgccccgttggcggtgtcgttgaagaatcttctgccgtcgtttggtgctttgaagggtgccgctggcgggcttggcggcgtgtttcgcgccctgggcggccctgtcggtattgtgatcggcttgtttgctgccatgtttgcgacgaacgcccagttccgtgccgcggtgatgcagcttgtggctgtggtgggccaggctttggggcagattatggccgctattcagcccttgtttggtttagtggccggtgttgtggcacagttggcgccagtgttcggccagattatcggtatggttgccggtttggctgcccagattgtgcctttgattagtatgcttgtcgcccggctggttcctgtgattacgcagattattggtgcggtgactcaggttgctgcaatgttgttgccggcgttgatgccggtgcttcaggcggttgtggctgtgatacggcaggttgttggtgttgtgatgcagcttgtgcctgtgttgatgcctgtgattcaacagattttgggtgctgtgatgtctgtgttgccgccgattattggtttgatacggtcgctgataccggtcatcatgtctgttatgcgcgtagtggtgcaggttgtttcggttgtgttgcaggtggttgcccgtattattccggttgtgatgccgattgttacggctgtgatcgggtttgttgcacgtattttgggtgctattgtgtcggctgccgccaggattattggggctgttgcccgtgttgtcggatgggttgtgggccatttcgtgtcgggtttggcgcgtatgggttcggttattcaggctggctggaatcatattagggcttttacgtctgcgtttattaacggtttcaagtcgatcatttctggcggcgtgaacgcggttgtcgggttttttacgcggcttggtttgtcggttgcctcccatgtgaggtctggttttaacgcggcacgtggtgctgtttcttctgcgatgaatgctatccgtagtgtggtgtcttcggtggcgtctgctgttggcgggtttttcgggtcgatggcgtctagggttcggaatggtgctgtgcgcgggtttaacggggcacggagtgcggcctcttctgctatgcatgctatggggtctgccgtgtctaacggtgtgcatagtgtactgggttttttccggaatctgcctggcaatattcggcatgctctcggcaatatggggtccctgttggtgtctgctggccgtgacgtggtgtctggtttgggtaatggtattcggaatgctttgagtggcctgctggatactgtgcgtaatatgggttcccaggtggctaacgctgcgaagtctgtgttgggtattcattccccgtcgagggtgtttcgtgatcaggttggccgtcaggttgttgccggtttggctgaggggatcaccgggaatgctggtttggcgttggatgcgatgtcgggtgttgcttcgcagcttccggatgctgtggatgcccggtttggtgtgcgatcgtctgtgggctcgtttaccccgtacgaccggtatcggcgtgctcagggtgagagtgttgtggtgaatgtgaatggcccgacgtatggtgatcctgccgagtttgcgaagcggattgagcgtcagcagcgtgacgctttgaacgcgttggcttatatgtgagtaaaggggtatgcatgtttattcctgacccgtctgatcgttctggtttgactgtgacatggtctatggatccgcggtttggtgatgagcgtgtgcttcatttgacggattatacggggtcgtctccggtgatgttgttgaatgattcgttgcgcggtttgggtgttcctgaggttgagcatttttctcaaactcatgttggggtgcacgggtcggagtggcgcgggtttaatgtgaagcctcgcgaggtgacgttgccggtgttggtgtcgggtgttgacccggatccggtgggcgggtttcgtgacggttttttgaaagcctatgacgagttgtggtctgcgtttcctcctggcgaggagggggagctgtctgtgaagactcctgccggtgtagagcgtgtgttgaagtgccggtttgattcggtggatgacacgtttacggttgatccggttaatcgtggctatgcgcgttatgtgcttcatttgacggcctatgacccgttttggtatggggatgagcaaaagtttcgtttcagtaacgcaaagttgcaggattggttgggtggcggccctgtcggcaaaaacgggactgcttttccggtggtgttgacgcctggtgttggttcgggttgggataacctgtcgaataagggtgatgtgcctgcgtggcctgtgattcgcgttgaggggccgttggattcgtggtcggtgcagattgatggtttgcgtgtgtcttcggactatcctgtcgaggagtttgattggatcactattgatacggatcctcgtaagcagtctgcgttgttgaacgggtttgaggatgtgatggatcgcctggatgagtgggagtttgcgccgattccgcctggcggttctaagagtgtgaatattgagatggttggtttgggtgccattgttgtgtcggtgcagtacaggtttttgagggcgtggtgaattgttgtggctggtcttgtcccgcagataacattgtttacgccagactatcatcgtgtggcgcctatcaatttttttgagtcgctaaaattgtcgttgaagtggaatggtttgtcgacgctggagttggtggtgtctggtgatcattcgaggcttgacgggttgacgaggccgggtgcacgcctggttgttgattatggtggtggccagattttttctgggcctgtgcgtaaagtgcacggggttgggcctcggcggtcttcccgtgtgactatcacttgtgaggatgatattcgcctgttgtggcgtatgttgatgtggcctgttaattatcgccccggtatggtgggttctgagtggcgtgcagaccgggattatgcccactattctggtgcagccgagtctattgctaagcaggtgttgggggataatgcttggcgttttccgcctggtttgttcatgatagaggatgagaagcgtggccgctatattaaggattttcaggtgcggtttcacgtgtttgcggacaagttgttgcctgtcctgtcgtgggctcggatgactgtttcggtgaaccagtttgagaatgcgaagacggatcagcgggggctggtgtttgattgtgttcctgctgtgacgcgtagccatgtgttgacgtccgagtcgggttcgattgtgtcgtgggagtatgtgagggatgcccccaaggctacgtcggtggttgttggtggccgcggcgagggtcgggatcggctgttttgtgaggatgttgattcgatggccgagggggactggtttgatcgtgtcgaggtgtttaaggatgcccgtaacacggattctgaacatgtgcatctcatcgatgaggctgagcaggtgttgtccgagttaggggccacgtcggggtttaagatcgagttggccgagtcggatgtgttgcgttttgggccaggcaatctgatgccaggggatttgatttatgtggatgtgggctcggggcctattgaggagattgttcggcagattgatgtggagtgtgattcgccgggtgacggctggacgaaagtgacaccggttgcgggggattatgaggataatccgtcggcgttgttggctcgccgtgtggctggtttggctgcgggtgtgcgggatttgcaaaaattctaattgttgggggtttgttgtgggtattgtgtgtaaagggtttgatggtgtgttgaccgagtatgattgggctcaaatgtctggtctgatgggtaatatgccgtcagttcatgggcctgacgattttcgtgtgggcactactgttcagggtgctacggtgttgtgtgaggttttgccggggcaggcttgggctcacggggtgatgtgcacgtcgaatagtgttgagacggtgacggggcagctgcctggtcctggtgagactcgctacgattatgtggtgttgtctcgggattgggagcagaatacggccaagttggagattgttcctggggggcgtgcggagcgtgccagggatgtgttgcgtgccgagcctggcgtgtttcatcagcagttgttggctactttggtgttgtcgtctaacgggttgcagcagcagttggataggcgtgccgtggcggctagggttgcgtttggggagtctgctgcgtgtgatcctacccctgtggagggtgaccgtgtgatggttccttcgggggctgtgtgggctaaccatgctaacgagtggatgttgttgtctcccaggattgagacgggttcgaagtcgatcatgtttggcgggtctgctgtgtatgcttacacaattccgtttgagcgcccgtttggtagtgcgcctgttgtggtggcgtctatggctacggcggctggtggtacgcagcagattgatgtgaaagcctacaatgtgactgccaaggattttggtttggcgtttattacgaatgatggttcgaagcctaacgatgtgcccgcaatagctaactggattgctgtcggcgtgtgactgtacaggtgttgtggcggatgttgtaatgttggggggctgtggtgtcgtggtttactcctgcactggtggcctctatctgtaccgcgttggccacgattttgggttcagttcaggcggtcacatctaaatcgaggaagcgtttacgcaggctatctgcgcaggttgatgcgatggaagagtatacgtggggtgtgcggcgtgaggtgcgccggtttaacgcgaggcttcctgacggggttgatccgcttgtgttgcctgagccgcctggtttcctatcggatgatgttgggggtgagtgatgagggagttggaggaggagaagcggcagcgtcgctcgtttgagagggcttccctgctgttgttgtttttgtcgcttgtgctgttgattgtggttgctgggggtgctttgcgtttcggggctgtatcctctgaacgggattctgagcaggcgagggcccagtcgaatggtacagcggccaggggtttagccagccgtgtgcggcaggtgtgtgcccatggtgggatggagtcggtacggcttcaccggtctggtttgtgtgtggatgctgtgcgtacggagcggagtgttcagggtgtgccgggcccggctggtgagcgcggcccgcaaggccctgcaggtgctgatgggcgtgacggtgttaatggttcgtctgggctggttggccctgttggtccgcagggttctcccggcttgaatggcgtgaaaggtcctgacgggttgcctggtgcaaatggatcggatggccgtgatggtgttccgggccgtgcaggtgttgacggcgctgatggtcgggatggttcggctggtgagcgcggtgatgtgggtccttcaggtcctgccggcccgcaaggcacacagggggaacggggtgagcgtggccccgtcggtgcgaacggatccgatggtaaagatggtaaggatgggcgctcggtggtgtctgtgtactgttctgatggtctcctggttgtgaaatatagtgacggtgtggcttctacaatatcgggctcggtggcctgccagggtgtgaaaccgtcgcctatggtgactatatcatcccacaaatagaaaggagtggctgtgatggtagtgtttggtggtggtgtgtggtgaggtttatcccagcagcgcaccattctgccggttcgaatagtccggtgaatagggttgtgattcatgcgacgtgcccggatgtggggtttccgtccgcctcacgtagggggagggctgtttctacggcaaactattttgcttccccatcgtctgggggttctgcccattatgtgtgcgatattagtgagacggtgcaatgtctgtctgagtctacgattggttggcatgccccgcctaaccctcatagtttgggtatagagatttgcgcggatggtggctcgcacgcctcgttcagggtgccggggcatgcttacactcgtgagcagtggcttgaccctcgcgtgtggcccgcggtggagcgtgccgcgatcctgtgtagacgtttgtgtgacaaatataatgttccgaaaaggaagcttagtgcagccgatttgaaggctggcaggcggggtgtttgcggccacgtggatgttacggatgcgtggcatcagtcggatcatgacgatcctgggccgtggtttccgtgggacaaatttatggccgtagtctgcggcggtagtggtagtgaggagttaactgtggctgatgtgaaagccttgcatgatcagattaaacaattgtctgcccagcttactggttcggtgaataagctgcaccatgatgttggtgtggtacaggtacagaatggtgatttgggtaaacgtgttgatgccttgtcgtgggtgaagaatccggtgacggggaagttgtggcgcacgaaggatgctttgtggagtgtctggtattacgtgttggagtgtcgcagccgcattgacaggcttgagtctactgttaacggtttgaaaaagtgatggtggtttgttgtgggtaaacagttttggttaggtttactggagcgggccctgaaaacttttattcaaacgtttgttgccgtgctcggtgttactgcgggtgtcacgtatactgcggagtcgtttcgcggtttgccgtgggagtcggcgttgatcacagccacggttgctgcggtgttgtcggttgctacttcgtttggtaatccgacgtttgtggctggtaagccgaagactacggttgtggataccgggcttgttccacccgatgataccggtttgatagaaccgcatgcggtggatgtgtcggatcctggcatgattgagccgatggatgatgcggatgttgccggctatgtgccgaagcgggctgccgagtcggaggttggcacagtagagtctactgttgcataattgaatatgtgtgtgccccagcggtgctgccacgattgtgtggtggttgccgctggggcacactttttgtttatgcgatatggctatgattcgttgctgtcgatggtgtcttcgagcatctgatacaggtggaggcaggtgcagatggtttcgctggcctggtcgagaacgtttcggccgataacgtttttgtggttgtcgcggtggcggatgatagcccacatgatctcgtcggctgccgcctgtaatagttttgcctggtatgcgattccggcgagccagtctagtgcttcctggcttgcctgtgtgtcgtctggaataccacgggtgttgctgttgcttgggtgtccttcactgtcgcatagccacaggatttcgctgcactcgtctagcgtgtcctggtcgatagcgagatcgtcgaggctgacattgttgacggtaaggttcacgttgtcgagggagatgggtacaccgtactggttttcgacactgtcaacaatgttttgtagttgttgcatgttggtgggctgttgttggatgatacggtgtaccgctgctttgagggcagtgtaggggatattgtgtgtgttgttcatggttttatttcatccctgtgctgtcgtcgttatcgtctggatagtatctactgtttgcgtaccctgttagggtgatcaatgtttggtctgcccactgtttcacggtttgccgggttacccctaatcgttgggctgctaccgaataggtttgatcatacccgtatacttcccggaatgctgccaaccgtgctaggtgttttcgctgtttggatggctggcaggtgagggtgtagtcgtcgatggccagctggaggtcgatcatggagacgatgttgttgccgtgatgctggggggcggttggtgggggtggcataccgggttctactgatggtttccatgggccgccgttccagatccattgggcggcttggataatatctgcggtggtgtaagtccggttcactggtcaccccctgaacaggttgtcgaggttgtctgggttactggtgttggtggtgtcgaatcgtcccacacagtggcagtagtcgtacatgagtttgataatgtgttggtggtcgccgaggtaggtgttgccactaatactgtaggtggctgtgccgtctttgccgataatgtatttggcggtgatggtttctggtgtttcggtgttggtgatgattgctgttgtggtggtgcctacggtttgtagcctggtggtttgggttccgtcgtcgagggtggtggtaaccataattggggttttccttaaatgcttgtctggttgtcggctagatgaataatatcggataaaggtttcggctggtctaggtgctgtaccgctttgttggctaaacgtttggctaccctgtaacacattttggtatagtgtttgttgtctaggttgtggtattgttcccgcaccgcaatatatagtagggagtcttggtacaggtcgtctgcactgattgcggggtagtgggtggctactttgatgcatgaccggttgagtgtgcgaagatgatggtcggtggtccatccccacgatgcggtggtggcccggtctgcttttgttggtcgtctactcatggcactatttcatctcgctatctggtagttgtttggtgttttatggttgatagtgtagcacacgagtccggggttgccggtggtgcccgtcttgtgccggtaccatgtggattcgccttccatggatgggcattggatgaaggtgcgttgtccttgctcggagatttctaggtggtgtcggtgcccggccatgaggatgtgggatgtggttccgttgtggaattcttgtccgcgccaccaatcatagtgtttgccggtgcgccattggtgtccgtgggcgtgcaggatttgtgtgcctgccacattgacggtggtggtcatttcgtctcggctggggaagtggaagtgtaggttggggtattggttgttgagttggtaggcttcggcgatggcgcggcagcagtccacgtcgaaggagtcgtcgtaggtggtgacgcctttgccgaagcgcacggcttcaccgtggttgccggggatggatgtgaccgttaggttggcgcagtggtcgaattggtggatgagttgcatcatggccatgcgggtgagccggatttgttcggtgaggggtgtttgtgtgcgccaggcgttgttgcctccttgtgacacgtatccttcgatcatgtcgccgaggaatgcgatgtggactcgttgcggtttgcctgcctgttgccagtagtgttttgcgactatgagggagtgcaaatagtcgtcggcgaagtgtgctgtttctcctccggggatgcctttgccgatttggaagtctcctgccccgatgacgaaggccgcagtgctgtagtcggtgcgggtgtcttgttcgggttttggtggctgccattcggctagtttatctacgagttcgtctacagggtaggggtttgttgcgggttggtggtcgatgattttttgtacggatcggccggtttctccgttcggtaaggtccattcggagatgcgtgtgcggcgtacagtaccattggctagattgtcgtcgatggtgtcgatggcgttgtcgtggttggctagctgtgtgagtagccggtctatattgtctatcactgggtatcctcttcctcgtgtggggtggtgttggcttgtttgcggcgatagtctttaataacggtggcggagatggggtatccggcttgggtgagctgttttgctagccatgaggcggggatggttttgtcggcgaggacgtctgcggctttgttgccgtagcgttggataagggtttcagttttggttgccatgatatcctaggggttgtgtggcgggttgccatcctgtgcggcagtcgccgtcgtgtcctggcttacgggtgcaccatgtgatggttccgtctgtgtggtggagttttttgccgcacatgacgttttgtagatgctccggcagctggtcggtgttgttgctggtttgtatgtcgaagagtgttttctggttggtgaaatgctctgacacggtgccattatgcacgggtagtatccatgttttccattgctgttgtagcctggtgttccagtggaattgtttggcggcgttttcggcctgttttaaggttttgtagtagccgactagtatgcgctggtgttcactgtcgggtgggttttggcctcgccaatattgtgccgccacggcgtagcggttgctggctgtgaaggcgtcccagcagtattcgataatgtgttgtagtgcactatcgggcatgtcttgtatttggttttcgttaagccattcttcaacaaggatgttgtgtatggcgcgtttgtctttgatggttggtttgaacgagatgctcacgatagtaccggctggtcgtcttgcatgaactggttgaaggtgttgtttccggcgtgttgggcttgtgtgatgtcctggtcggtccagtcggggtgttgctgtttcagatagtgccagtggcacgcattgtaggtttcgtcttgtagccgtgtgagatggttttcggtgatgatttgtttccacattgtccatgacacgtcgagccggttgaggatttcgagggctgggatgttaaattggttgaggaagagtatttcgtgggtgtagtagtttttctcgtaggcgtcccatccgcttcggtgcctgttgggctggtttttggggtaggcttcccggcatactttgtgcaaatgtttggccatgtcgtcgggtagtttaatgtcggggttggcgcggatcatggatcgcataccatcataggtggtgccccaggtgtgcataatgtaggtggggttttctccatcagcccatttttctgcacagatggcgaggcggatgcgcctcctggctgcttggctaatgttgcgccggttggggatggggcacgtgtctaggggatccatgatgttttagtgtacctttctttgttggggttgcttgtgtggttttattgtagcactgtgttgagtgcttgtgtcaaccctgttttgccggcctgaaggtaggtgtctgtgacatcccccagggtgaggggcacgtgtacggcttgggggagtgctgtttggagggtttgggccatcttgtctcccgcggggtcgggatcggaccagatgtaaacatggtcgtagccttcgaagaatttggtccaaaagttttgccacgaggttgcgccgggtatggcgacggccgaccatccgcattgttcgaggatcatggagtcgaattcgccttcgcaaatgtgcatttcggctgccgggttggccatggcggccatgttgtagatggagcccgtgtctccggccggggttaagtatttggggtggttgtgttctttgcagtcgtgtgggagtgagcagcggaaacgcatttttcttatttcggctggccgcccccaaacggggtacatgtaggggatggtgatgcactggttgtagtcttcgtggcctgggatggggtcattgtcgatgtatccaaggtggtggtagcgggctgtttcttcgctgatgcctcttgctgagagaaggtcgagaatgttttcgaggtgggtttcgtagagggccgaggctttctggattcggcggcgttccgcaatgttgtatgggcgtatgctgtcgtacattcgggtttctttcttcgagttgttgttgtagtttggcgaggccgcctccgacaccgcatgtgtggcagtaccagacgcccttgtcgaggttgatgctcatggagggttggtggtcgtcgtggaacgggcagaggatgtgttgctcgttcctggacgggttgtagcgtatccggtaggtgtcgaggaggcggcaggtgtcagaggtgtgggaggagttctgcgagggttgataccacataggcttcgctccatggcttgttgcgctgtttcatgaccactaacccgattgtggatttgtcaaccaggttgcggtgggtttcatagttgcgcgcctcccggctggcttgtttcacgaattgggcgagatgttgctgtcctgctttcgcttcgatcacataggttttgtggccggttgtgaggatgaggtcgccttcgtcttcgtggccgttgaggtgtagccgttcgatgtcgtgtccgatgtcacgtagctggtgcaataatcgtgtttcccactcggcaccggcccggcggttgcgtgattgctgtgtagccatcataatcctttgtgtgttgtggccatgttccatggctgtttttcggctagtggtccgaagaatgtgtattcggggtaggctcgtagccgttcgtatcgggtgccgtctgggctggatttgcctgtgcgctgtttcaacactgcgatgcgcgcctctgccggtatcgatagcccgttgccgttatcctcgccaccatacaatgagactccgaggatgagttgtggtttctcggatagcccgtttttgatctctcgtctggcgggcgggtgttcgatgtcggagccggttttgtcggttgcgtggtgtgtgacgataatggtggagccagtatccctacctaatgctgtgatccattgcatggcttcttgctgtgcctggtagtcactctcgcagtcttggatgtccatcaggttgtcgataacaatgagtggtgggaaggtgttccacatttccatgtaggcttgcagctccatggtgatgtctgtccatgtgatgggtgactggaatgagaatgtgatgtgttggccgtggtggatgctgcctcgatagtattctggcccgtagtcgtcgatgttgtgttgtatttgggcggttgtgtgttgggtgttgagggatatgattcgtgtggaggcctcccagggtgtcatgtcccctgaaatatatagggcgggctggttgagcatcgcggtgatgaacattgctagcccggatttttggctgccggaccgccccgcaatcatgacgagatcccctttgtggatgtgcatgtcttggttgcggtagaggggttctagttgtggtatacggggcagctcagcagcggtttgggaggctctctcgaaggatcgttgtagagagagcatcgggaccttaatctatctatctgttacggtttggatgaatattggcggtcagatggagtcgatatctacatcatcgctgccggtggtgttgggctggctgtctcgctggtcaacgtaggcggctacaaggtcgtagatggcgtcgtctaggggtttgaggatgacagcgttgaacccgtttttagtgcgcactgtggcgagtttgaaggcctgctcctcgccgaggtaggtttcgagttcgcggatcatggagtgtgggcggtcgttgttgcctcgcgctttttcgatgatagcgttggggatggtttctggggtgccgttgttgaggtcgtcgagggtgtggaagatagtaacgtcggcgtaaatacggtctgcgacctgtccgccgtagccttcggtgttgtgttccacgtcgtggattttgaaggcgatggcggtggcgtcctggtttttggacgggttgaagaaggtgctgctgttgctgttgttgcggtagttggcgagtcccataacttttgtccttttgctgtttgtgttgttttgttgtcttatattggtttatcgggtgaggctgtttcgtttagtgcggaacgcctcagacacgtcactgttactggtgatgatctttttgtactgtttcaagaggtctgctaattgtgctttactggtggctttgttgatcctgtcgatgataatgtcgttttcttgattggcgattttgttgacgtagtctttggctgctttgtcgtatcggtcttggaggatgatggatgcgctcgctacgagcgttgccagatcccagtctttggagactgtttcgtctttgagtccgcctagcaggtcgatgatggcctgttttgtctgctctgctgtgtctcctcggatgaccgcccatggtgcagcatagtctccaccatatttgagtgtgatagtgagtcgatcattgtctgtggtgcgctcttctgtcacttgttttccttttctttattgtctgcttggggtggctgtacggtggattctaccgggtatctgtaggcgtctttcccgtctaccgcccagcaggcgtcctgtacggggcatcctttacagagtgctgtaacatgtgggacgaagatgcctttgctgattcctttcattgcttgactgtacatggatgatacatgccggtaggtattgttgtcaagatcgtacagttcggttgctgtgccctgagtttgcgatgtggtgttgtttcggctgctggcgggtgtccaaaacatgcctttcgtcacgttgatgtcgtgttggttgagcatgtaccggtaggtgtgcaactgcatggcatcaacagggaggcgacccgttttgaggtcgagaataaacgtctcaccagtgtcggtgtcggtgaagatacggtcgatgtagccaacaatctttgtgccgtcctggagggtggtttcgactgggtattcgatgcctggctggccgtcgagtattgctgtgtggtattgtggatagtttgtgcgccactgtttccacctgtcgacgaagatggggccatagatcatccaccagtcgtagtctttcttgtgtggcccgcctgactcgcacatgtttttgcacactctgccggagggtttgatttctgtgccttcggattcgacgagggcaacttgggtgtcgaaaacgtttttgaaggatgagagtttgtctggcagtgcagggtattcgtcggggttgtacaggtggaggtcgtactgttcggtgatgtggtgtatggcgcttccggcgatggttgcgtaccaggtgtggtgctgtgcatgatagccgtgggataggcgccatttttctccgcattcggcccactgggtgagtgaactgtaggagatgtggcctggatggttgatggttttcggatattgtgctagaggcattacttgtcgcttttgttccatgggttgcgggtgtcttggccggcattgtgttgctggtaggcgaggagtgctaggcagtgccaggctgcgtgtgccaggtgtggcaggtgtgattcatcgtcgaggttgtttccttgctgccaggatagcacatggcggtagagggcgtcgacactgtgacaccaggggtatcctccggtccagttgttgtcgccgtatttggtggcaccgtagcctgctacttcgcctagggcgtgcaaggctacggggtcaatgagggagagcctgcagagtttgagttcttttcgggcacctgtgtcggggtcggtgtacatgcgggtgggctcatccatggggggtgtgtgcctttcttggtttgggttactggttgttgtcgtgggctagtgctactgcgagaataatgatggcgagggtttcagcaataagtatgggtgttgtgatcatttgctgtctcggggattgttggtgagggttgaggcacccaggagggtggcgagggcgcatgcggcgataatggcgagggctgccttgtggggggtgccggttgcgtacatccatgtgatgatgccgccttggatccatgccagtgtggtgaagaaggtttcgtaactgtgcaactcgatactgttgggtgtgttcatgctcgctcctgaagaatggtgttgatggttttgtaaatgttgtacaggtcggtttcgatagataacagttggtggatttggtggtcgaggttgatatctgggttgagggtgttgatgcgggatgcgatgtcggtggctgtgcgtagtgtgccgccggtgtggtgaataatgtgtgcggtgtcggcgagtccggtggtgacagcatagtgggagaggagaggcatagcggggatgctccttggcgggttactgttgcgggttgatgttgaggtcggtgacgtgcgggtggtcttctgttcctgtgatgaggcagtggacggtgactgggagtttggatgcgccgggctgtttcatggttgcgccgtagacgatgctgaacgtgtctttaccgatggttttgtggagttggaggtcgatgtcggggttgccgttccagttgacgccgtgtgcggcggccttctgttcggctttacggttgcaggtgtgtgctgcggtgatcatggtgagaccctgcgcggtttcttcaccccttgcttgggcttgcttgtgggttttggcttgttcggcttgtagggagcgggtggcggctgcctgccgtgccgctttctcggctttgcgctgttgggcggtttttggtgtccattctgtgttggctgtggttacctgtggtgcgggttgtgatgcgagtggggggttgtcgtcgggggctgggaggaaggatgcggcggcgatgatggcggctgtgattccggcgatggtgtagccgtttttcttgttcatgactgttatcccctttccggggtgttgttcgttgctgacatgattgatacttccagacggggctatgactgtcaaggtgtcgctcagtttgtgtgagcgatccttgtgtggctgggggttatcgggcgaacagggtgagtaggtgtcctaagttgatgcgactcacgttccagtagagttgcgtggcttcaccgccagtgagcggcttccacttgttgtggctgaacactgtaccgtcggatgctatgaacgtgtcggggcgtagcttgtgaagttcagtctctacgctctgccggtaggcttcggcgaggccctcaaaatccatgtggtcaccggagaggttttcgaggcgtgtcaggtcgaagggtgtggggcagtcgtagctggcgggggtgtagagctgggtgaagtggtcggcgatcttttgcatcatgattccttttctagtgtggtgggttaatagttttatcgggtggatgcgacaaggatggcgtctatgtcgatcatgtcgatgagatcgtggagttcctcggcctcattctcagataggtggcgccagtcgtagtcgccgtacacggcgccgtcgagggtgacagtccacaggggccggatgagccgtatggcttcttgtactttggcgtggtacatgcggcgcaccatatccagatcgatgtcgtctgaatggtttccggtgaggctgtggagactgagggggtcgatttctgtctgctggtagaggctggtgaaggatggggtgatgagtgtgccatccatgggggggtgctcctttctggattgtttgggttggttgttgtggtttctaggatgtgtaggttgcgacccacagtcaaggctgcgctcaatccgaatgagcgtttagcgtgtgtggcatgggatgtggcgtatctcacttaagccttccttgcctctctaggcgtctcaaatcttctgggggtaggattatatagggttgaccctgctgatcgattctagagcccttctagggcctctcgggggtatgtctgagtgatgacgggtgtggcagatgatctagcgagtcaaggtgccgagcttagacataaaatctatcatctaggtgtgtgagatgtatcacatcctcctggcttggtgtgcactttcaaggctactctgtcgatctgacgtggagggtgtagcccagaaataccgtttaaagccactgggagacgcctagaagcgccttacggggtgggggctaggtatttatacccccagcatattctgatcgattctagacgcctacagaagcctggtacacgatcagctatccagacgcagaccatcagcccctatcccgcttagctaagcctgcactatgtggacattgttggatactgtagaggaaagaaggacacggtaaaggaaagagggggaatcagtcttagggtcttaggtacttcagttcaccttaggggcttagcgctgagcacttagcgctaagcccctcaagggctcggcatcagcctgacaggcttagcccatactgcacagccctgaaaggagtacacgccatcagggaaggcttgagagtacgaggagcctcagcgacgagtactcgaaagcctgagggaacacctttagcactgatgggcctagcgcgttcggaaagaacacagaagtaaagtgtgacagctgtccgggagtgaaccccgttctggctaggggtttcagtcttaactacctgtaaaggttacaagactctaagaaaatttaagaaaattcttaagaagaaagttgtgttgttatcccccaaaaaacacccgtttacacccctcaaacccgcctatagagccaaatccgccagtttgactcgtcccaggtggcgtatgctaggctggacaggtagccagctggacgcgaggccagaaagtgctgacgcacttcccgacctcgcttaccatcagtctaccaaacactttaaagcttcaaggctaagccactcagtgctaagcccttaagacctcaacgcttagcaccgagcccttgaggggctcagcattagcactaaggcttaaacacttaataatttaagtaaacataaaagcttttaagacttaaagtaaatatataaccttaacagttaaacgtttaaagctttaaaccttaacacctaagttaggtataaaaccttaaaggcttagcacttaaggatataaacttaacatcagtgtttaagactttaaaacttaaagtaactataagacttaaagacttataagctttaatacttatataataataaagtttaagactgatggttaactttaagtgtttaaagtcttatagttactttaagttttaaagcttataagttataaaagttttagaagagctaaggggttaacttctttacttctctactctctttggttctttctctcttctcttcttttcttcatcaggggagaagaggaacctttaccatcagcgctgatgggctttcacggtgtgtctcgtgtgtctctggtcgcaagctcccatcgcaccctcgccacccctcaccttgaccgtgtctcctttacagcttggtgtgttcggctgaaggcgtacggcgtgtcacgctaacacccttaacaccaggtaagacttaaagtgtatattatatgtagaagactttaaaaactttgaggatgtacacgttttggctgtgacctacaccgctaggcgctaggccttgaaacgcgaacacaccctcccccatttttcttccgtgtccttcttcttttgacacagctggggggcgatgtgatctttctcacatgcaggggtggagggtagaaaacaaccaccccaccacaaacagaacaccccaccaaacgaacaaaacagggcctagaatcgaccagcagggcaagggcaaggtattcatacccccaacgcatttcaggctgttacagaggcaatcagaggcttacagggaccataggtgaacgggaggcgcgatggcacacaccaaccgcaccgcatccgccgcccaccggcgctggcggcaacgactcatcacccaagcccgacaacaaggccaaaccgaatgtcccttgtgtggagccaccatcacctgggacacacacgacctaccaaccagccccgaagccgaccacatcacacctgtcagcaggggaggactcaacaccctcgacaacggccaaatcatctgcagaacatgcaacagaagcaaaggcaacagaacacaaccaaacattcgattccaacaacaaaccacaaaaacattgattccatggtgacaaaccccacaacccccaccggggacaccccctgcacacccgtgcaagacc

SEQ ID NO: 46 - DNA, 29454 bp, Bacteriophage of P. acnes
agtgaaatacctcccttttgtggatttatctgtttgtcgactttttgtgttggtggtgagtgttgtgcagcctgagcttcctgggtctcgtgattggtgtggggagacgcttcgctggtggcgtgtgtggggtgaggatagtcgcgcatcgtacgtgtcggatgaggagtggctgtttctcatggatgctgcggtgattcatgattgtgtgtggcgtgagggccgggctgaccttgtggcttcgcttcgtgctcatgtgaaggcttttatgggcatgttggatcgttattcggttgatgtggcgtctggtggccgtggtgggggttctgcggtggcgatgattgaccggtatcggaagcgcaagggggcctgattaggtgtctggtgttgttgggtctcaggtgcctcgtcaccgtgtggctgcggcgtattcggtgactgccggcggggatgctggggaattgggtcgtgcgtatgggttgatgcctgatccgtggcagcagcaggtgttggatgattggcttgctgtcggtggtaatggcaggcttgcttctggtgtgtgtggggtgtttgttccgcggcagaatggcaagaatgctattttggagattgtggagttgtttaaggcgactattcagggtcgccgtattttgcatacggctcacgagttgaagtcggctcgtaaggcgtttatgcgtttgaggtcgttttttgagaatgagcggcagtttcctgacttgtatcgtatggtgaagtcgattcgtgcgacgaatggtcaggaggctattgtgttgcatcatccggattgtgccacgtttgagcgtaagtgtggctgtccgggttggggttcggttgagtttgtggcccgttctcgtggttctgctcgcgggtttacggttgatgatttggtgtgtgatgaggctcaggagttgtcggatgagcagttggaggctttgcttcctaccgtgagcgctgcaccgtctggtgatcctcagcagattttccttggtaccccgccggggcctttggctgacggtagcgtggtgttgcgtcttcgcgggcaggctttgtcgggtggtaaaaggattgcgtggacggagttttcgattcctgacgagacggttccggatgatctatcgaggtcgtggcggaagttggctggggatacgaatcctgcgctgggtcgccgcctgaatttcgggacggtgagcgatgagcatgagtcgatgtcggctgccgggtttgctcgggagaggcttggctggtgggatcgtggccagtcggctacgtctgtgataccggccgataagtgggctcagtctgctgtggatgaggcgagtctggttggcgggaaagtgtttggtatctctttttcgcgatcaggcaatagggttgctttggctggtgccggcaggactgatgctggtgttcatgttgaggttattgatggcctgtcggggacgattgtggatggtgtaggccagctggctgactggttggcgttgcgttggggtgacacggaaaagatcatggttgccggttcgggtgctgtgttgttgcagaaggctttgactgatcgtggtgttccgggtcggggtgttgtggttgccgatactggggtgtatgtggaggcgtgtcaagcctttctggaaggcgtaaggtctgggagtgtttctcatcctcgtgctgattctcgccgtgacatgttggatattgctgtaaggtcggcggttcagaaacataaaggctctgcgtggggttggggttccacatttaaggacggttctgaggttcctttggaggctgtgtcgctggcgtattttggtgcgaaaacagttaaagcgaagcggcgtgagcgtagtggtaggaagcgggtgtctgtggtatgaactcggatgagttggctctgattgagggcatgtttgatcgtattaagagtttgtcttcgtggcattgtcgcattgagggctactatgagggttctagccgggtgcgtgatttgggggtagctattcccccggagttgcagcgtgtgcagactgtggtgtcgtggcctgggattgcggtggatgctttggaggagcgtctggattggctgggctggactaatggtgacggctacggcctggatggtgtgtatgctgcgaatcggcttgctacggcgtcgtgtgatgtgcatttggatgcgctgatttttggtttgtcgtttgtggctatcattcctcatggtgatggttcggtgtcggttcgtccgcagtcaccaaagaattgtactggccggttttctgccgatgggtctcgtctggatgctggccttgtggtgcagcagacgtgtgatcctgaggttgttgaggcggagttgttgcttcctgatgtgattgttcaggttgagcggcggggttcgcgtgaatgggttgaggtggatcgtataccgaatgtgttgggtgctgttccgcttgtgcctattgtgaatcgtcgccgtacttctaggattgatggccgttcggagattacgaggtctattagggcttacacggatgaggctgtgcgcacactgttggggcagtctgtgaatcgtgatttttatgcgtatcctcagcgttgggtgactggcgtgagcgcggatgagttttcgcagcctggctgggtcctgtcgatggcttctgtgtgggctgtcgataaggatgatgatggggacactccgaatgtggggtcgtttcctgtcaattcgcctacaccgtattcggatcagatgagactgttggcgcagttgacggctggtgaggcggctgttccggaacgctatttcgggtttatcacgtctaacccgcctagtggggaggctttggcggccgaggaatctcggcttgtgaagcgtgctgagcggcgccaaacgtcgtttggtcagggctggctgtcggttggtttcctggctgccaagtcgcttgattcttccgttaacgaagctgatttttttggtgatgttggtttgcgttggcgtgatgcatcaacacctactcgggcggctacagcggatgctgtgacgaagctggttggtgccggtattttgcctgctgattctcgcacggtgttggagatgctggggcttgatgatgtgcaggttgaggctgtgatgcggcatcgcgccgaatctgcggatccgttggctgcgcttgctggggctatttcccgtcaaacgaacgaggtttgatggatggcttcgggtgctatgtcgaggctggctgcgactgagtatcagcgtgaggcggtcaggtttgctgggaagtatgcgggctattattctgagcttggccgtttgtggcgtgccggcaggatgagtgacacacagtatgttcgtttgtgtgtggagttggagcgtgccggccatgatggttcggcgtcgttggccgccaggtttgtgtcggattttcggaagcttaacggtgtcgatcctggtttgattgtgtatgacgagtttgatgctgccgcggctttggctaggtcgttttcgactatgaagattatgaatagtgacccggatcgggcgaatgatacgattgatgcgatggcggcgggttttgatcgggctgtcatgaatgctggtcgtgacacggttgagtggtctgcgggtgcgcagggtaggtcgtggcgtcgtgtcacggatggggatccgtgtgctttttgtgccatgttggctacgaggtcggattatacgactaaggaaagggcgctcactactggtcatacgcggcgtcataagcgtggtggtaagcgtccgtttggttcgaagtatcatgatcattgtgggtgtacggtggttgaggttgttggcccttgggaaccgaatagggctgatgccgagtatcagaggacgtatgagaaggctcgcgagtgggttgatgatcatgggttgcagcagtcgcctggcaatattttgaaggctatgcgtactgttggtggcatgagataatttgatgtggtttccggttgtgcgccgccggttatcggtgcacagggttgtctcccgcacgggggtcaacaatgttgtgttgttttccgcaaggagtgtagggttaggctatggccgatcagagtgttgaggaacagaatgttgacaatgatgttgtggagtccggaaagggtgacggcattgttgacacggtgaagggcgatcaaggcaaacaggttgaagatcagtcgaagaatgaaggcgagggtaaatcgccggggactgattggaaggctgaggctcgtaaatgggagtctcgtgcgaaaagtaatttttccgagctggagaagcttcgtacatcgagtgacgattctggatctactattgatgagcttcgccgcaagaatgaggaactcgaagacaggatcaacgggtttgttcttgagggtgtgaagcgtgatgtggctgccgagtgtggcctttcgggtgatgctgtcgcttttctgcacggcgacgatcgtgaagcgctggtggagtctgctaaggctttgaagggtttgatcgaccatagtagtggtggcgcgggtgtgcgccgtcttgcggggagtgcccccgttgatgatgttaaacgacgtgagggtgtcgcgtttgtggatgctcttgtcaataattctaggagatgatttgtgatggctgacgattttctttctgcagggaagcttgagcttcctggttctatgattggtgcggttcgtgaccgtgctatcgattctggtgttttggcgaagctgtcgccggagcagccgactatttttggccctgtgaagggtgccgtgtttagtggtgttcctcgcgctaagattgttggtgagggtgaggttaagccttccgcgtctgttgatgtttcggcgtttactgcgcagcctatcaaggttgtgactcagcagcgtgtttcggacgagtttatgtgggctgatgctgattaccgtctgggtgttttgcaggatctgatttccccggctcttggtgcttcgattggtcgcgctgttgatctgattgctttccatggtattgatccggctacgggtaagcctgctgcggctgtgaagacttcgctggataagacgaagcatgttgttgatgccacggattctgccacgactgatctggtcaaggcggtcggcctgattgctggtgctggtttgcaggttcctaacggtgtcgccctggatccggcgttctcgtttgctctgtcgactgaggtgtatccgaaggggtctccgcttgccggtcagccgatgtatcctgccgccgggttcgctggtttggataattggcgcggcctgaatgttggtgcttcttcgactgtttcgggtgccccggagatgtcgcctgcctctggtgtgaaggctattgttggtgatttctctcgtgtccattgggggttccagcgtaacttcccgatcgagctgatcgagtatggtgacccggatcagactggccgcgaccttaagggccacaatgaggttatggttcgcgccgaggctgtcctgtatgtggctatcgagtcgcttgactcgtttgctgttgtgaaggagaaggcttccccgaagcctaatccgccggccgagaactgatttatttgttgcgataatgttcatgctgtgtgcagggggtggtgttgatgggtatcattttgaggcctgaggatattgagcctttcgccgatattcctaaagataagcttgaggcgatgattgccgatgtggaggctgttgctgtcagtgtcgccccctgtatcgctaaaccggatttcaaatacaaggatgctgctaaggctatcctacgtagggctttgctgcgctggaatgatactggtgtttctgggcaggttcagtatgagtctgcgggcccgtttgctcagactacacggtctagtactcccacgaacttgttgtggccttccgagattgccgcgttgaagaagctgtgtgagggtgatggtggggctggtaaagcgttcactatcacaccgaccatgaggagtagtgtgaatcattctgaggtgtgttccacggtgtggggtgagggttgctcgtgcgggtcgaatattaacggctacgctggccctttgtgggagatatgatatgaccagttttccttacggtgaaacggttgtgatgcttcagccgactgttcgtgtcgatgatttgggcgacaaggttgaggattggggtcatcctgtagaaaccgtgtaccataacgtggctatctatgcttccgtttcgcaggaggatgaggccgcggggcgtgattctgattatgagcattggtcgatgcttttcaagcagcctgttgtgggcgctgattatcgttgtaggtggcgtattcggggtgtggtgtgggaggctgacgggtctcctattgtgtggcatcacccaatgtctggctgggatgctggtacgcaggttaatgtgaagcgtaagaagggctgatggttgtggcacgtgatgtgaatgtgaagcttaatcttcctggtatccgtgaggtgttgaagtcttctggggtgcagggcatgttggcggagcgtggcgagcgtgtcaagcatgcggcctctgctaatgttggcggtaatgcttttgatagggcccagtatcgtgccgggttgtcgtcggaggtgcaggttcaccgtgttgaggctgtcgctaggattggcaccacctataagggtggtaagcgtattgaggcgaagcatggcacgttggctaggtcgattggggctgcgtcgtgatcgtttacggtgatccgcgaatatgggcgaaacgcgtgctcaaggatgatggctggctgtccgatataccgtgtacaggtactgtcccggatgatttcacgggtgacttgatttggttggcgttggatggtggcccgcagttgcatgttcgtgagcgtgtttttttgcgggtgaatgtgttttctgatatgccggatcgtgctatgtctttggcgcgtcgtgttgaggctgtgctggctgatggtgttgatggtgatccggtggtgttttgtaggcgttctactggtcctgatttgttggttgatggtgcacgttttgatgtgtattcgctgtttgagctggtgtgccgtcctgtcgaatccgagtaaacgtatttgttttctatattttgtttttgtttgattatttttgggggttgtgatggctgctacacgtaaagcgtctaatgttcgctctgctgttacgggtgacgtctatattggtaaagctcatgccggtgacactattgatggtgtgaagacggttcctgacggtcttaccgctttagggtatctgtctgatgacgggtttaagattaagccggagcgtaaaacggatgatttgaaggcttggcagaatgcggatgttgttcgcactgtggctacggagtcgtctatcgagatttctttccagctgatcgagtctaagaaggaggttatcgaactgttttggcagtcgaaggttactgccggagccgattcgggttcgttcgatatttctcctggtgccacgacgggtgttcatgccctgttgatggatattattgatggcgatcaggttattcgctactatttccctgaggttgagttgattgatcgtgacgagattaagggtaagaatggcgaggtgtacgggtatggtgtgacgttgaaggcgtatcctgcccagattaataagaagggtgatgcggtgtcgggtcgggggtggatgacggctttaaaagctgatactcctccgactcctcctccggccccgaagcctccgaagcctgagccggatccgaatccgccgtctaataactgatacacatagtttgagggattgttgatagatgagtgacacaggttacacgttgaagattggtgaccgtagctgggtgttggcggatgcggaggaaacggcgcaggctgttcctgcccgcgttttccgtcgtgccgccaggattgcccagtcgggggagtctgcggatttcgcccaggttgaggtgatgttttctatgttggaggctgccgccccagaggatgctgtggaggccttggaggggcttcctatggttcgtgtggccgagattttccgccagtggatggaatataagcctgaaggtaagggtgcctcgctgggggaatagtttggctccacggcctgattgatgattatcgtggggccatcgaatacgatttccgcactaaatttggtgtttctgtttatagtgttggtggcccgcagatgtgttggggtgaggctgtccggctggctggcgtgttgtgtaccgatacgtctagccagttggcggcccacctgaatggttggcagcgcccgtttgagtggtgtgagtgggctgtgctggacatgttggatcattacaggtctgctaatagtgaggggcagccggagcctgtggcgaggcctacggatgagcgtagggcccggtttacgtctgggcaggtggacgatattttggcgcgtgttcgtgccggcggcggggtgtctcgcgagattaatattatggggtgaatagtgtatgtctggtgagattgcttccgcatatgtgtcgttgtatacgaagatgcctggccttaaaagtgatgttggtaaacagctttctggggttatgcctgctgagggtcagcgttcgggtagtctttttgctaagggcatgaagttggctcttggtggcgccgcaatggtgggtgctatcaatgttgctaagaagggcctcaagtcgatttatgatgtgactattggtggcggtatagctagggcgatggctatcgatgaggctcaggctaaactgactggtttgggtcatacgtcttctgacacgtcttcgattatgaattcggctattgaggctgtgactggtacgtcgtatgcgttgggtgatgcggcttctactgctgccgcgttgtctgcttcgggtgtgcagtctggcgggcagatgacggatgtgttgaagactatcgccgatgtgtcttatatttcgggtaagtcgtttcaggatacgggcgctatttttacgtctgtgatggctcgcggtaagttgcagggcgatgacatgttgcagcttacgatggcgggtgttcctgtgctgtctttgcttgccaggcagacgggtaaaacctcggctgaggtgtcgcagatggtgtcgaaggggcagattgattttaacacgtttgcggctgcgatgaagcttggcatgggtggtgctgcgcaggcgtctggtaagacgtttgagggcgctatgaagaatgttaagggcgccttgggctatcttggtgctacggctatggccccgtttcttaacgggttgaggcagatttttgttgcgttgaatccggttattaagtcggtcacggattcggtgaagccgatgtttgctgccgtcgatgctggtattcagcgtatgatgccgtctattttggcgtggattaatcgtatgccgggcatgattacgagaatgaatgcacagatgcgcgccaaggtggagcagctgaagagcgtttttgcgagaatgcatttgcctgtcccgaaggtgaatttgggtgccatgtttgcgggtggcacagcagtgtttggtgttgtggctgcgggtgtggggaagcttgttgcagggtttgccccgttggcggtgtcgttgaagaatcttctgccgtcgtttggtgctttgaagggtgccgctggcgggcttggcggcgtgtttcgcgccctgggcggccctgtcggtattgtgatcggcttgtttgctgccatgtttgcgacgaacgcccagttccgtgccgcggtgatgcagcttgtggctgtggtgggccaggctttggggcagattatggccgctattcagcccttgtttggtttagtggccggtgttgtggcacagttggcgccagtgttcggccagattatcggtatggttgccggtttggctgcccagattgtgcctttgattagtatgcttgtcgcccggctggttcctgtgattacgcagattattggtgcggtgactcaggttgctgcaatgttgttgccggcgttgatgccggtgcttcaggcggttgtggctgtgatacggcaggttgttggtgttgtgatgcagcttgtgcctgtgttgatgcctgtgattcaacagattttgggtgctgtgatgtctgtgttgccgccgattattggtttgatacggtcgctgataccggtcatcatgtctgttatgcgcgtagtggtgcaggttgtttcggttgtgttgcaggtggttgcccgtattattccggttgtgatgccgattgttacggctgtgatcgggtttgttgcacgtattttgggtgctattgtgtcggctgccgccaggattattggggctgttgcccgtgttgtcggatgggttgtgggccatttcgtgtcgggtttggcgcgtatgggttcggttattcaggctggctggaatcatattagggcttttacgtctgcgtttattaacggtttcaagtcgatcatttctggcggcgtgaacgcggttgtcgggttttttacgcggcttggtttgtcggttgcctcccatgtgaggtctggttttaacgcggcacgtggtgctgtttcttctgcgatgaatgctatccgtagtgtggtgtcttcggtggcgtctgctgttggcgggtttttcgggtcgatggcgtctagggttcggaatggtgctgtgcgcgggtttaacggggcacggagtgcggcctcttctgctatgcatgctatggggtctgccgtgtctaacggtgtgcatagtgtactgggttttttccggaatctgcctggcaatattcggcatgctctcggcaatatggggtccctgttggtgtctgctggccgtgacgtggtgtctggtttgggtaatggtattcggaatgctttgagtggcctgctggatactgtgcgtaatatgggttcccaggtggctaacgctgcgaagtctgtgttgggtattcattccccgtcgagggtgtttcgtgatcaggttggccgtcaggttgttgccggtttggctgaggggatcaccgggaatgctggtttggcgttggatgcgatgtcgggtgttgcttcgcagcttccggatgctgtggatgcccggtttggtgtgcgatcgtctgtgggctcgtttaccccgtacgaccggtatcggcgtgctcagggtgagagtgttgtggtgaatgtgaatggcccgacgtatggtgatcctgccgagtttgcgaagcggattgagcgtcagcagcgtgacgctttgaacgcgttggcttatatgtgagtaaaggggtatgcatgtttattcctgacccgtctgatcgttctggtttgactgtgacatggtctatggatccgcggtttggtgatgagcgtgtgcttcatttgacggattatacggggtcgtctccggtgatgttgttgaatgattcgttgcgcggtttgggtgttcctgaggttgagcatttttctcaaactcatgttggggtgcacgggtcggagtggcgcgggtttaatgtgaagcctcgcgaggtgacgttgccggtgttggtgtcgggtgttgacccggatccggtgggcgggtttcgtgacggttttttgaaagcctatgacgagttgtggtctgcgtttcctcctggcgaggagggggagctgtctgtgaagactcctgccggtgtagagcgtgtgttgaagtgccggtttgattcggtggatgacacgtttacggttgatccggttaatcgtggctatgcgcgttatgtgcttcatttgacggcctatgacccgttttggtatggggatgagcaaaagtttcgtttcagtaacgcaaagttgcaggattggttgggtggcggccctgtcggcaaaaacgggactgcttttccggtggtgttgacgcctggtgttggttcgggttgggataacctgtcgaataagggtgatgtgcctgcgtggcctgtgattcgcgttgaggggccgttggattcgtggtcggtgcagattgatggtttgcgtgtgtcttcggactatcctgtcgaggagtttgattggatcactattgatacggatcctcgtaagcagtctgcgttgttgaacgggtttgaggatgtgatggatcgcctggatgagtgggagtttgcgccgattccgcctggcggttctaagagtgtgaatattgagatggttggtttgggtgccattgttgtgtcggtgcagtacaggtttttgagggcgtggtgaattgttgtggctggtcttgtcccgcagataacattgtttacgccagactatcatcgtgtggcgcctatcaatttttttgagtcgctaaaattgtcgttgaagtggaatggtttgtcgacgctggagttggtggtgtctggtgatcattcgaggcttgacgggttgacgaggccgggtgcacgcctggttgttgattatggtggtggccagattttttctgggcctgtgcgtaaagtgcacggggttgggcctcggcggtcttcccgtgtgactatcacttgtgaggatgatattcgcctgttgtggcgtatgttgatgtggcctgttaattatcgccccggtatggtgggttctgagtggcgtgcagaccgggattatgcccactattctggtgcagccgagtctattgctaagcaggtgttgggggataatgcttggcgttttccgcctggtttgttcatgatagaggatgagaagcgtggccgctatattaaggattttcaggtgcggtttcacgtgtttgcggacaagttgttgcctgtcctgtcgtgggctcggatgactgtttcggtgaaccagtttgagaatgcgaagacggatcagcgggggctggtgtttgattgtgttcctgctgtgacgcgtagccatgtgttgacgtccgagtcgggttcgattgtgtcgtgggagtatgtgagggatgcccccaaggctacgtcggtggttgttggtggccgcggcgagggtcgggatcggctgttttgtgaggatgttgattcgatggccgagggggactggtttgatcgtgtcgaggtgtttaaggatgcccgtaacactgattcggataaggtgtctctttacgatgaggcggagcaggtgttgtcggaatcacaggccacgtctggttttaagatcgagttggccgagtcggatgtgttgcgttttgggcccggcaatctgatgcctggggatttgatttatgttgatgtgggttcggggcctattgcggagattgttcggcagattgatgtggagtgtgattcgcctggtgacggctggacgaaggtgacaccggttgcgggggattatgaggataatccgtcggcgttgctagcgcggcgtgttgccggtttggctgccggtgtgcgggatttgcaaaagttttaaaaaagctcaacggattggggtttgttgtgggtattgtgtgcaagggttttgatggtgtgttgaccgagtatgattgggctcaaatgtctggtctgatgggtaatatgccgtcggtgaaaggtccggacgattttcgtgtcggcacgacgattcagggtgccacagtgttgtgtgaggttttgccggggcaagcgtgggctcacggggtgatgtgtacttcgaatagtgttgagacggtgacgggccagctgccgggtcctggcgagacgagatacgactatgttgttctgtcgcgggattgggagcagaatacggcccggttggagattgttcctggggggcgtgcggagcgtgcccgtgacgtgttgcgtgccgagcctggcgtgtaccatcagcaactgttggctaccctggtgttgtcgtctaacgggttgcagcagcagctggataggcgtgccgtggcggctagggtggcgtttggggagtctgctgcgtgtgaccctacccctgtggagggtgaccgggtgatggttccttcgggggctgtgtgggctaaccatgctggcgagtggaggctgttgtctccgcgtatcgagacgggttcgaagtcgatcatgtttggtggatctaatgtgtatgcttacacgatcccgtttgatcgccagtttactagtccgcctgttgtggtggcgtctatggggaccgcggctgggggtacgacacagattgatgtgaaagcctacaatattactagtaaggattttggtttggcgtttatcacgaatgacgggtctaaaccgaatggtgtgcccgcggtggctaactggatagctgtgggcgtgtgacggtacaggcgttgtggtggctggtgtgatgttgggggggctgccgtgtcgtggatgactcctgcattggtggcttctatttgtaccgcgttggccacggttttgggttctgttcaggctatcacatcccggtctagaaagcgtttgcgaaggttgtctgcgcaggtggatgctttggaagagtatacgtggggtgtgcggcgtgaggttcgccggtttaacgccaggcttcctgacggggttgatccgcttgtgttgcctgagccgcctggtttcctatcggatgatgttgggggtgagtgatgagggagttggaggaggagaagcggcagcgtcgctcgtttgagagggcttccctgctgttgttgtttttgtcgcttgtgctgttgattgtggttgctgggggtgctttgcgtttcggggctgtatcctctgaacgggattctgagcaggcgagggcccagtcgaatggtacagcggccaggggtttagccagccgtgtgcggcaggtgtgtgcccatggtgggatggagtcggtacggcttcaccggtctggtttgtgtgtggatgctgtgcgtacggagcggagtgttcagggtgtgccgggcccggctggtgagcgcggcccgcaaggccctgcaggtgctgatgggcgtgacggtgttaatggttcgtctgggctggttggccctgttggtccgcagggttctcccggcttgaatggcgtgaaaggtcctgacgggttgcctggtgcaaatggatcggatggccgtgatggtgttccgggccgtgcaggtgttgacggcgctgatggtcgggatggttcggctggtgagcgcggtgatgtgggtccttcaggtcctgccggcccgcaaggtgcacagggggaacggggtgagcgtggccccgtcggtgcgaacggatccgatggtaaagatggtaaggatgggcgctcggtggtgtctgtgtactgttctgatggtctcctggttgtgaaatatagtgacggtgtggcttctacaatatcgggctcggtggcctgccagggtgtgaaaccgtcgcctatggtgactatatcatcccacaaatagaaaggagtggctgtgatggtagtgtttggtggtggtgtgtggtgaggtttatcccagcagcgcaccattctgccggttcgaatagtccggtgaatagggttgtgattcatgcgacgtgcccggatgtggggtttccgtccgcctcacgtagggggagggctgtttctacggcaaactattttgcttccccatcgtctgggggttctgcccattatgtgtgcgatattagtgagacggtgcaatgtctgtctgagtctacgattggttggcatgccccgcctaaccctcatagtttgggtatagagatttgcgcggatggtggctcgcacgcctcgttcagggtgccggggcatgcttacactcgtgagcagtggcttgaccctcgcgtgtggcccgcggtggagcgtgccgcgatcctgtgtagacgtttgtgtgacaaatataatgttccgaaaaggaagcttagtgcagccgatttgaaggctggcaggcggggtgtttgcggccacgtggatgttacggatgcgtggcatcagtcggatcatgacgatcctgggccgtggtttccgtgggacaaatttatggccgtagtctgcggcggtagtggtagtgaggagttaactgtggctgatgtgaaagccttgcatgatcagattaaacaattgtctgcccagcttactggttcggtgaataagctgcaccatgatgttggtgtggtacaggtacagaatggtgatttgggtaaacgtgttgatgccttgtcgtgggtgaagaatccggtgacggggaagttgtggcgcacgaaggatgctttgtggagtgtctggtattacgtgttggagtgtcgcagccgcattgacaggcttgagtctactgttaacggtttgaaaaagtgatggtggtttgttgtgggtaaacagttttggttaggtttactggagcgggccctgaaaacttttattcaaacgtttgttgccgtgctcggtgttactgcgggtgtcacgtatactgcggagtcgtttcgcggtttgccgtgggagtcggcgttgatcacagccacggttgctgcggtgttgtcggttgctacttcgtttggtaatccgacgtttgtggctggtaagccgaagactacggttgtggataccgggcttgttccacccgatgataccggtttgatagaaccgcatgcggtggatgtgtcggatcctggcatgattgagccgatggatgatgcggatgttgccggctatgtgccgaagcgggctgccgagtcggaggttggcacagtagagtctactgttgcataattgaatatgtgtgtgccccagcggtgctgccacgattgtgtggtggttgccgctggggcacactttttgtttatgcgatatggctatgattcgttgctgtcgatggtgtcttcgagcatctgatacaggtggaggcaggtgcagatggtttcgctggcctggtcgagaacgtttcggccgataacgtttttgtggttgtcgcggtggcggatgatagcccacatgatctcgtcggctgccgcctgtaatagttttgcctggtatgcgattccggcgagccagtctagtgcttcctggcttgcctgtgtgtcgtctggaataccacgggtgttgctgttgcttgggtgtccttcactgtcgcatagccacaggatttcgctgcactcgtctagcgtgtcctggtcgatagcgagatcgtcgaggctgacattgttgacggtaaggttcacgttgtcgagggagatgggtacaccgtactggttttcgacactgtcaacaatgttttgtagttgttgcatgttggtgggctgttgttggatgatacggtgtaccgctgctttgagggcagtgtaggggatattgtgtgtgttgttcatggttttatttcatccctgtgctgtcgtcgttatcgtctggatagtatctactgtttgcgtaccctgttagggtgatcaatgtttggtctgcccactgtttcacggtttgccgggttacccctaatcgttgggctgctaccgaataggtttgatcatacccgtatacttcccggaatgctgccaaccgtgctaggtgttttcgctgtttggatggctggcaggtgagggtgtagtcgtcgatggccagctggaggtcgatcatggagacgatgttgttgccgtgatgctggggggcggttggtgggggtggcataccgggttctactgatggtttccatgggccgccgttccagatccattgggcggcttggataatatctgcggtggtgtaagtccggttcactggtcaccccctgaacaggttgtcgaggttgtctgggttactggtgttggtggtgtcgaatcgtcccacacagtggcagtagtcgtacatgagtttgataatgtgttggtggtcgccgaggtaggtgttgccactaatactgtaggtggctgtgccgtctttgccgataatgtatttggcggtgatggtttctggtgtttcggtgttggtgatgattgctgttgtggtggtgcctacggtttgtagcctggtggtttgggttccgtcgtcgagggtggtggtaaccataattggggttttccttaaatgcttgtctggttgtcggctagatgaataatatcggataaaggtttcggctggtctaggtgctgtaccgctttgttggctaaacgtttggctaccctgtaacacattttggtatagtgtttgttgtctaggttgtggtattgttcccgcaccgcaatatatagtagggagtcttggtacaggtcgtctgcactgattgcggggtagtgggtggctactttgatgcatgaccggttgagtgtgcgaagatgatggtcggtggtccatccccacgatgcggtggtggcccggtctgcttttgttggtcgtctactcatggcactatttcatctcgctatctggtagttgtttggtgttttatggttgatagtgtagcacacgagtccggggttgccggtggtgcccgtcttgtgccggtaccatgtggattcgccttccatggatgggcattggatgaaggtgcgttgtccttgctcggagatttctaggtggtgtcggtgcccggccatgaggatgtgggatgtggttccgttgtggaattcttgtccgcgccaccaatcatagtgtttgccggtgcgccattggtgtccgtgggcgtgcaggatttgtgtgcctgccacattgacggtggtggtcatttcgtctcggctggggaagtggaagtgtaggttggggtattggttgttgagttggtaggcttcggcgatggcgcggcagcagtccacgtcgaaggagtcgtcgtaggtggtgacgcctttgccgaagcgcacggcttcaccgtggttgccggggatggatgtgaccgttaggttggcgcagtggtcgaattggtggatgagttgcatcatggccatgcgggtgagccggatttgttcggtgaggggtgtttgtgtgcgccaggcgttgttgcctccttgtgacacgtatccttcgatcatgtcgccgaggaatgcgatgtggactcgttgcggtttgcctgcctgttgccagtagtgttttgcgactatgagggagtgcaaatagtcgtcggcgaagtgtgctgtttctcctccggggatgcctttgccgatttggaagtctcctgccccgatgacgaaggccgcagtgctgtagtcggtgcgggtgtcttgttcgggttttggtggctgccattcggctagtttatctacgagttcgtctacagggtaggggtttgttgcgggttggtggtcgatgattttttgtacggatcggccggtttctccgttcggtaaggtccattcggagatgcgtgtgcggcgtacagtaccattggctagattgtcgtcgatggtgtcgatggcgttgtcgtggttggctagctgtgtgagtagccggtctatattgtctatcactgggtatcctcttcctcgtgtggggtggtgttggcttgtttgcggcgatagtctttaataacggtggcggagatggggtatccggcttgggtgagctgttttgctagccatgaggcggggatggttttgtcggcgaggacgtctgcggctttgttgccgtagcgttggataagggtttcagttttggttgccatgatatcctaggggttgtgtggcgggttgccatcctgtgcggcagtcgccgtcgtgtcctggcttacgggtgcaccatgtgatggttccgtctgtgtggtggagttttttgccgcacatgacgttttgtagatgctccggcagctggtcggtgttgttgctggtttgtatgtcgaagagtgttttctggttggtgaaatgctctgacacggtgccattatgcacgggtagtatccatgttttccattgctgttgtagcctggtgttccagtggaattgtttggcggcgttttcggcctgttttaaggttttgtagtagccgactagtatgcgctggtgttcactgtcgggtgggttttggcctcgccaatattgtgccgccacggcgtagcggttgctggctgtgaaggcgtcccagcagtattcgataatgtgttgtagtgcactatcgggcatgtcttgtatttggttttcgttaagccattcttcaacaaggatgttgtgtatggcgcgtttgtctttgatggttggtttgaacgagatgctcacgatagtaccggctggtcgtcttgcatgaactggttgaaggtgttgtttccggcgtgttgggcttgtgtgatgtcctggtcggtccagtcggggtgttgctgtttcagatagtgccagtggcacgcattgtaggtttcgtcttgtagccgtgtgagatggttttcggtgatgatttgtttccacattgtccatgacacgtcgagccggttgaggatttcgagggctgggatgttaaattggttgaggaagagtatttcgtgggtgtagtagtttttctcgtaggcgtcccatccgcttcggtgcctgttgggctggtttttggggtaggcttcccggcatactttgtgcaaatgtttggccatgtcgtcgggtagtttaatgtcggggttggcgcggatcatggatcgcataccatcataggtggtgccccaggtgtgcataatgtaggtggggttttctccatcagcccatttttctgcacagatggcgaggcggatgcgcctcctggctgcttggctaatgttgcgccggttggggatggggcacgtgtctaggggatccatgatgttttagtgtacctttctttgttggggttgcttgtgtggttttattgtagcactgtgttgagtgcttgtgtcaaccctgttttgccggcctgaaggtaggtgtctgtgacatcccccagggtgaggggcacgtgtacggcttgggggagtgctgtttggagggtttgggccatcttgtctcccgcggggtcgggatcggaccagatgtaaacatggtcgtagccttcgaagaatttggtccaaaagttttgccacgaggttgcgccgggtatggcgacggccgaccatccgcattgttcgaggatcatggagtcgaattcgccttcgcaaatgtgcatttcggctgccgggttggccatggcggccatgttgtagatggagcccgtgtctccggccggggttaagtatttggggtggttgtgttctttgcagtcgtgtgggagtgagcagcggaaacgcatttttcttatttcggctggccgcccccaaacggggtacatgtaggggatggtgatgcactggttgtagtcttcgtggcctgggatggggtcattgtcgatgtatccaaggtggtggtagcgggctgtttcttcgctgatgcctcttgctgagagaaggtcgagaatgttttcgaggtgggtttcgtagagggccgaggctttctggattcggcggcgttccgcaatgttgtatgggcgtatgctgtcgtacattcgggtttctttcttcgagttgttgttgtagtttggcgaggccgcctccgacaccgcatgtgtggcagtaccagacgcccttgtcgaggttgatgctcatggagggttggtggtcgtcgtggaacgggcagaggatgtgttgctcgttcctggacgggttgtagcgtatccggtaggtgtcgaggaggcggcaggtgtcagaggtgtgggaggagttctgcgagggttgataccacataggcttcgctccatggcttgttgcgctgtttcatgaccactaacccgattgtggatttgtcaaccaggttgcggtgggtttcatagttgcgcgcctcccggctggcttgtttcacgaattgggcgagatgttgctgtcctgctttcgcttcgatcacataggttttgtggccggttgtgaggatgaggtcgccttcgtcttcgtggccgttgaggtgtagccgttcgatgtcgtgtccgatgtcacgtagctggtgcaataatcgtgtttcccactcggcaccggcccggcggttgcgtgattgctgtgtagccatcataatcctttgtgtgttgtggccatgttccatggctgtttttcggctagtggtccgaagaatgtgtattcggggtaggctcgtagccgttcgtatcgggtgccgtctgggctggatttgcctgtgcgctgtttcaacactgcgatgcgcgcctctgccggtatcgatagcccgttgccgttatcctcgccaccatacaatgagactccgaggatgagttgtggtttctcggatagcccgtttttgatctctcgtctggcgggcgggtgttcgatgtcggagccggttttgtcggttgcgtggtgtgtgacgataatggtggagccagtatccctacctaatgctgtgatccattgcatggcttcttgctgtgcctggtagtcactctcgcagtcttggatgtccatcaggttgtcgataacaatgagtggtgggaaggtgttccacatttccatgtaggcttgcagctccatggtgatgtctgtccatgtgatgggtgactggaatgagaatgtgatgtgttggccgtggtggatgctgcctcgatagtattctggcccgtagtcgtcgatgttgtgttgtatttgggcggttgtgtgttgggtgttgagggatatgattcgtgtggaggcctcccagggtgtcatgtcccctgaaatatatagggcgggctggttgagcatcgcggtgatgaacattgctagcccggatttttggctgccggaccgccccgcaatcatgacgagatcccctttgtggatgtgcatgtcttggttgcggtagaggggttctagttgtggtatacggggcagctcagcagcggtttgggaggctctctcgaaggatcgttgtagagagagcatcgggaccttaatctatctatctgttacggtttggatgaatattggcggtcagatggagtcgatatctacatcatcgctgccggtggtgttgggctggctgtctcgctggtcaacgtaggcggctacaaggtcgtagatggcgtcgtctaggggtttgaggatgacagcgttgaacccgtttttagtgcgcactgtggcgagtttgaaggcctgctcctcgccgaggtaggtttcgagttcgcggatcatggagtgtgggcggtcgttgttgcctcgcgctttttcgatgatagcgttggggatggtttctggggtgccgttgttgaggtcgtcgagggtgtggaagatagtaacgtcggcgtaaatacggtctgcgacctgtccgccgtagccttcggtgttgtgttccacgtcgtggattttgaaggcgatggcggtggcgtcctggtttttggacgggttgaagaaggtgctgctgttgctgttgttgcggtagttggcgagtcccataacttttgtccttttgctgtttgtgttgttttgttgtcttatattggtttatcgggtgaggctgtttcgtttagtgcggaacgcctcagacacgtcactgttactggtgatgatctttttgtactgtttcaagaggtctgctaattgtgctttactggtggctttgttgatcctgtcgatgataatgtcgttttcttgattggcgattttgttgacgtagtctttggctgctttgtcgtatcggtcttggaggatgatggatgcgctcgctacgagcgttgccagatcccagtctttggagactgtttcgtctttgagtccgcctagcaggtcgatgatggcctgttttgtctgctctgctgtgtctcctcggatgaccgcccatggtgcagcatagtctccaccatatttgagtgtgatagtgagtcgatcattgtctgtggtgcgctcttctgtcacttgttttccttttctttattgtctgcttggggtggctgtacggtggattctaccgggtatctgtaggcgtctttcccgtctaccgcccagcaggcgtcctgtacggggcatcctttacagagtgctgtaacatgtgggacgaagatgcctttgctgattcctttcattgcttgactgtacatggatgatacatgccggtaggtattgttgtcaagatcgtacagttcggttgctgtgccctgagtttgcgatgtggtgttgtttcggctgctggcgggtgtccaaaacatgcctttcgtcacgttgatgtcgtgttggttgagcatgtaccggtaggtgtgcaactgcatggcatcaacagggaggcgacccgttttgaggtcgagaataaacgtctcaccagtgtcggtgtcggtgaagatacggtcgatgtagccaacaatctttgtgccgtcctggagggtggtttcgactgggtattcgatgcctggctggccgtcgagtattgctgtgtggtattgtggatagtttgtgcgccactgtttccacctgtcgacgaagatggggccatagatcatccaccagtcgtagtctttcttgtgtggcccgcctgactcgcacatgtttttgcacactctgccggagggtttgatttctgtgccttcggattcgacgagggcaacttgggtgtcgaaaacgtttttgaaggatgagagtttgtctggcagtgcagggtattcgtcggggttgtacaggtggaggtcgtactgttcggtgatgtggtgtatggcgcttccggcgatggttgcgtaccaggtgtggtgctgtgcatgatagccgtgggataggcgccatttttctccgcattcggcccactgggtgagtgaactgtaggagatgtggcctggatggttgatggttttcggatattgtgctagaggcattacttgtcgcttttgttccatgggttgcgggtgtcttggccggcattgtgttgctggtaggcgaggagtgctaggcagtgccaggctgcgtgtgccaggtgtggcaggtgtgattcatcgtcgaggttgtttccttgctgccaggatagcacatggcggtagagggcgtcgacactgtgacaccaggggtatcctccggtccagttgttgtcgccgtatttggtggcaccgtagcctgctacttcgcctagggcgtgcaaggctacggggtcaatgagggagagcctgcagagtttgagttcttttcgggcacctgtgtcggggtcggtgtacatgcgggtgggctcatccatggggggtgtgtgcctttcttggtttgggttactggttgttgtcgtgggctagtgctactgcgagaataatgatggcgagggtttcagcaataagtatgggtgttgtgatcatttgctgtctcggggattgttggtgagggttgaggcacccaggagggtggcgagggcgcatgcggcgataatggcgagggctgccttgtggggggtgccggttgcgtacatccatgtgatgatgccgccttggatccatgccagtgtggtgaagaaggtttcgtaactgtgcaactcgatactgttgggtgtgttcatgctcgctcctgaagaatggtgttgatggttttgtaaatgttgtacaggtcggtttcgatagataacagttggtggatttggtggtcgaggttgatatctgggttgagggtgttgatgcgggatgcgatgtcggtggctgtgcgtagtgtgccgccggtgtggtgaataatgtgtgcggtgtcggcgagtccggtggtgacagcatagtgggagaggagaggcatagcggggatgctccttggcgggttactgttgcgggttgatgttgaggtcggtgacgtgcgggtggtcttctgttcctgtgatgaggcagtggacggtgactgggagtttggatgcgccgggctgtttcatggttgcgccgtagacgatgctgaacgtgtctttaccgatggttttgtggagttggaggtcgatgtcggggttgccgttccagttgacgccgtgtgcggcggccttctgttcggctttacggttgcaggtgtgtgctgcggtgatcatggtgagaccctgcgcggtttcttcaccccttgcttgggcttgcttgtgggttttggcttgttcggcttgtagggagcgggtggcggctgcctgccgtgccgctttctcggctttgcgctgttgggcggtttttggtgtccattctgtgttggctgtggttacctgtggtgcgggttgtgatgcgagtggggggttgtcgtcgggggctgggaggaaggatgcggcggcgatgatggcggctgtgattccggcgatggtgtagccgtttttcttgttcatgactgttatcccctttccggggtgttgttcgttgctgacatgattgatacttccagacggggctatgactgtcaaggtgtcgctcagtttgtgtgagcgatccttgtgtggctgggggttatcgggcgaacagggtgagtaggtgtcctaagttgatgcgactcacgttccagtagagttgcgtggcttcaccgccagtgagcggcttccacttgttgtggctgaacactgtaccgtcggatgctatgaacgtgtcggggcgtagcttgtgaagttcagtctctacgctctgccggtaggcttcggcgaggccctcaaaatccatgtggtcaccggagaggttttcgaggcgtgtcaggtcgaagggtgtggggcagtcgtagctggcgggggtgtagagctgggtgaagtggtcggcgatcttttgcatcatgattccttttctagtgtggtgggttaatagttttatcgggtggatgcgacaaggatggcgtctatgtcgatcatgtcgatgagatcgtggagttcctcggcctcattctcagataggtggcgccagtcgtagtcgccgtacacggcgccgtcgagggtgacagtccacaggggccggatgagccgtatggcttcttgtactttggcgtggtacatgcggcgcaccatatccagatcgatgtcgtctgaatggtttccggtgaggctgtggagactgagggggtcgatttctgtctgctggtagaggctggtgaaggatggggtgatgagtgtgccatccatgggggggtgctcctttctggattgtttgggttggttgttgtggtttctaggatgtgtaggttgcgacccacagtcaaggctgcgctcaatccgaatgagcgtttagcgtgtgtggcatgggatgtggcgtatctcacttaagccttccttgcctctctaggcgtctcaaatcttctgggggtaggattatatagggttgaccctgctgatcgattctagagcccttctagggcctctcgggggtatgtctgagtgatgacgggtgtggcagatgatctagcgagtcaaggtgccgagcttagacataaaatctatcatctaggtgtgtgagatgtatcacatcctcctggcttggtgtgcactttcaaggctactctgtcgatctgacgtggagggtgtagcccagaaataccgtttaaagccactgggagacgcctagaagcgccttacggggtgggggctaggtatttatacccccagcatattctgatcgattctagacgcctacagaagcctggtacacgatcagctatccagacgcagaccatcagcccctatcccgcttagctaagcctgcactatgtggacattgttggatactgtagaggaaagaaggacacggtaaaggaaagagggggaatcagtcttagggtcttaggtacttcagttcaccttaggggcttagcgctgagcacttagcgctaagcccctcaagggctcggcatcagcctgacaggcttagcccatactgcacagccctgaaaggagtacacgccatcagggaaggcttgagagtacgaggagcctcagcgacgagtactcgaaagcctgagggaacacctttagcactgatgggcctagcgcgttcggaaagaacacagaagtaaagtgtgacagctgtccgggagtgaaccccgttctggctaggggtttcagtcttaactacctgtaaaggttacaagactctaagaaaatttaagaaaattcttaagaagaaagttgtgttgttatcccccaaaaaacacccgtttacacccctcaaacccgcctatagagccaaatccgccagtttgactcgtcccaggtggcgtatgctaggctggacaggtagccagctggacgcgaggccagaaagtgctgacgcacttcccgacctcgcttaccatcagtctaccaaacactttaaagcttcaaggctaagccactcagtgctaagcccttaagacctcaacgcttagcaccgagcccttgaggggctcagcattagcactaaggcttaaacacttaataatttaagtaaacataaaagcttttaagacttaaagtaaatatataaccttaacagttaaacgtttaaagctttaaaccttaacacctaagttaggtataaaaccttaaaggcttagcacttaaggatataaacttaacatcagtgtttaagactttaaaacttaaagtaactataagacttaaagacttataagctttaatacttatataataataaagtttaagactgatggttaactttaagtgtttaaagtcttatagttactttaagttttaaagcttataagttataaaagttttagaagagctaaggggttaacttctttacttctctactctctttggttctttctctcttctcttcttttcttcatcaggggagaagaggaacctttaccatcagcgctgatgggctttcacggtgtgtctcgtgtgtctctggtcgcaagctcccatcgcaccctcgccacccctcaccttgaccgtgtctcctttacagcttggtgtgttcggctgaaggcgtacggcgtgtcacgctaacacccttaacaccaggtaagacttaaagtgtatattatatgtagaagactttaaaaactttgaggatgtacacgttttggctgtgacctacaccgctaggcgctaggccttgaaacgcgaacacaccctcccccatttttcttccgtgtccttcttcttttgacacagctggggggcgatgtgatctttctcacatgcaggggtggagggtagaaaacaaccaccccaccacaaacagaacaccccaccaaacgaacaaaacagggcctagaatcgaccagcagggcaagggcaaggtattcatacccccaacgcatttcaggctgttacagaggcaatcagaggcttacagggaccataggtgaacgggaggcgcgatggcacacaccaaccgcaccgcatccgccgcccaccggcgctggcggcaacgactcatcacccaagcccgacaacaaggccaaaccgaatgtcccttgtgtggagccaccatcacctgggacacacacgacctaccaaccagccccgaagccgaccacatcacacctgtcagcaggggaggactcaacaccctcgacaacggccaaatcatctgcagaacatgcaacagaagcaaaggcaacagaacacaaccaaacattcgattccaacaacaaaccacaaaaacattgattccatggtgacaaaccccacaacccccaccggggacaccccctgcacacccgtgcaagacc

SEQ ID NO: 47 - DNA, 29491 bp, Bacteriophage of P. acnes
agtgaaatacctcccttttttggttttgtctgtttgtcgactttttgtgttggtggtgagtgttgtgcagcctgagcttcctggtagtcgtgattggtgtggggagacgcgtcgttggtggcgtgtgtggggtgaggatagtcgcgcgccgtatgtgtctgatgaggagtggttgtttctcatggatgctgcggtgattcatgattgtgtgtggcgtgagggtcgcgcggatttggtggcttcgcttcgtgctcatgtgaaggcttttatgggcatgttggatcgttattcggttgatgtggcgtctggtggccggggtgggggttctgcggtggcgatgattgaccggtataggaagcgcaagggggcctgattaggtgtctggtgttgtgggttctcaggttcctcgtcatcgtgtggctgcggcgtattcggtgtctgctggcggtgatgctggggagttgggtcgtgcgtatgggttgacgcctgatccgtggcagcagcaggtgttggatgattggcttgctgttggtagcaatggcaggcttgcttcgggtgtgtgtggggtgtttgtgcctcgccagaatggcaagaacgcgatccttgaggttgtggagttgtttaaggcgactattcagggtcgccgtattttgcatacggctcacgagttgaagtcggctcgtaaggcgtttatgcggttgaggtcgttttttgagaatgagcggcagtttcctgacttgtatcgtatggtgaagtcgattcgggcgacgaatggtcaggaggctattgtgttgcatcacccggattgtgccacgtttgagaagaagtgtggctgtccgggttggggttcggttgagtttgtggcccgttctcggggttcggctcgcgggtttacggttgatgatttggtgtgtgatgaggctcaggagttgtcggatgagcagttggaggcgttgcttcctacagtaagcgctgccccgtctggtgatccgcagcagattttccttggcacgccgcctgggccgttggcggatggttcggttgtgttgcgtttgcgtgggcaggctttgtcgggtggtaaaaggtttgcgtggacggagttttcgattcctgacgagtctgatccggatgatgtgtcacgccagtggcggaagcttgcgggggatacgaatccggcgttgggtcgccgcctgaatttcgggaccgtaagcgatgagcatgagtcgatgtctgctgccgggtttgctcgggagcggcttggatggtgggatcgtggccagtctgctgcgtctgtgattccggcggataagtgggctcagtctgctgtggatgaggcgagtctggttggcgggaaagtgtttggtgtctcgttttctcgttcgggggatcgtgtcgctttggcgggtgccggccggactgatgctggggttcatgttgaggttattgatgggctgtcgggaacgattgttgatggtgtgggccggttggcggactggttggcggttcgttggggtgatactggccggatcatggttgccgggtctggtgcggtgttgttgcagaaggcgttgacggatcgtggtgttccgggccgtggcgtggtggttgccgatactggcatctatgtggaggcgtgtcaagccttcctggaaggtgtaaggtctgggaatgtttctcatcctcgtgctgattcgaggcgtgacatgttggatattgctgtgaggtcggcggttcagaaaaagaaaggctctgcgtggggttggggttcctcgtttaaggatggttctgaggttcctttggaggctgtgtctttggcgtttttgggggctaaacgtgttcgtcgtggccgtcgggatcgtagtggtaggaagcgggtgtctgtggtatgaacgtggacgagttggctctgattgagggcatgtacgatcgtatccaaaggttgtcttcgtggcattgtcgtattgagggctactatgagggttctagccgggtgcgtgatttgggggtggctattcctccggagttgcagcgtgtgcagactgtggtgtcgtggcctggtatagctgtggatgctttggaggagcgtctggattggctgggctggactaatggtgacggctacggcctggatggtgtgtatgctgcgaatcggcttgctacggcgtcgtgtgatgtgcatttggatgcgctgatttttggtttgtcgtttgtggctgttattccccaggatgatgggtcggtgttggttcgtccgcagtcaccaaagaattgtactggccggttttcggctgacggttctcgtttggatgcgggtttggtggtgcagcagacgtgtgatcctgaggttgttgaggcggagttgttgctgcctgatgtgattgttcaggtggagcggcgtgggtctcgtgagtgggttgagacgggccgtataccgaatgtgttgggtgctgttccgttggtgcctgttgtgaatcgtcgccgtacgtcgaggattgatggccgttcggagatcactcggtcgattcgtgcttacacggatgaggctgttcgcacactgttggggcagtctgtgaatcgtgacttctatgcgtatcctcagcgttgggtgactggcgtgagcgcggatgagttttcgcaacctggctgggtgttgtcgatggcttctgtgtgggctgtggataaggatgatgatggtgacaccccgaatgtggggtcgtttcctgtgaattctcctacaccgtattcggatcagatgcgtttgttggcgcagttgactgcgggtgaggcggctgttccggaacgctatttcgggtttatcacgtctaacccgccttctggggaggctttggctgcggaggagtctcggcttgtgaagcgtgctgaacgcaggcagacgtcgtttggtcagggttggttgtcggttggtttcctggctgcccgggcgttggattcgagtgttgatgaggccgcgttttttggtgatgttggtttgcgttggcgtgatgcttcgacgcctacccgggcggctacggctgatgctgtgacgaagcttgttggtgccggtattttgcctgctgattctcgtacggtgttggagatgttgggtttggatgatgtgcaggttgaggctgtgatgcggcatcgtgccgagtcttcggatccgttggcggcgctggctggggctatttctcgtcaaactaacgaggtttgataggcgatggcttcgggggctatgtcgaggcttgctgcgactgagtatcagcgtgaggctgtcaggtttgctgggaagtatgcgggctattattctgagcttggtcgtttgtggcgtgccggcaggatgagtgacacgcagtatgttcgtttgtgtgtggagttggagcgtgccggccatgatggttcggcatcgttggctgccaggtttgtgtcggattttcgccggttgaatggtgtggatccgggtttgattgtgtatgacgagtttgatgctgcggcggctttggctaggtcgttttcgactatgaagattcttgagagtgacccggatagggcgaatgacacgattgatgcgatggctgcgggttttgatcgggctgtcatgaatgctggccgtgacacggttgagtggtctgcgggtgcgcagggtaggtcgtggcgcagggtgactgatggtgatccgtgcgcgttttgtgccatgttggctacgaggtcggattatacgactaaggaaagggcgcttactactggtcatacgcggcgtcataagcgtgccggtaggcgtccgtttggttcgaagtatcatgatcattgtggttgtacggtggttgaggttgttggcccttgggaaccaaatagggctgatgccgagtctcagaggacgtatgagaaggcccgtgagtgggttgatgatcatgggttgcagcagtcgcctggcaatattttgaaggctatgcgtactgttggcgacatgagatgatggtttccggttgtgtgccgccggttatcggtgcacagggttgtctcccgcacgggggtcaacaatgttgtgttgttttccgcaaggagtatagggttaggctatggccgatcaaaaagttgaagaacagaatgttgacaatgatgctgttgagcccggaaagggtggagacgttgttgatgttgtgaaggatgggcaggcttccggcgatgatcatgccggtgatgtttccgtgaaggaggagtcttcttctggcacggattggaaggctgaggcccgtaagtgggagtctcgtgctaaaagtaatttcgccgagttggagaagcttcgtacatcgagtgacgattctggatctactattgatgagcttcgccgcaagaatgaggaactcgaagacaggatcaacgggtttgttcttgagggtgtgaagcgcgaggtggcttcagagtatggtttgtccagtgatgcggtcgctttcttgcacggtggcgatcgtgaagcgctggtggagtctgctaaggctttgaagggtttgatcgaccagagtggtggtggcgcgggtgtgcgccgtcttgcggggagtgcccccgttgatgatgttaaacgacgtgagggtgtcgcgtttgtggatgctcttgtcaataattctaggagatgatttctgatggctgacgattttctttctgcagggaagcttgagcttcctggttctatgattggtgcggttcgtgaccgtgctatcgattctggtgttttggcgaaactgtcgccggagcagccgactatttttggcccggtgaagggtgccgtgtttagtggtgttcctcgcgctaagattgttggtgagggcgaggttaagccttccgcttcggttgatgtttcggcgtttactgcgcagcctatcaaggttgtgactcagcagcgtgtctcggacgagtttatgtgggctgatgctgattaccgtctgggtgttttgcaggatctgatttctcccgctcttggtgcttctattggtcgcgccgtggatctgattgctttccatggtgttgatccggctacgggtaagcctgctgcggctgtcaaggtgtcgctggataagacgaagaagacggttgatgccaccgattccgctacgactgatcttgttaaggctgtcggcttgattgcgggtgccggtttgcaggttcctaacggggtcgccctggatccggcgttctcgtttgctctgtctaccgaggtgtatccgaaggggtctccgcttgccggtcagcctatgtatcctgccgccgggtttgccggtttggataattggcgtgggctgaatgttggtgcttcttcgactgtttcgggtgccccggagatgtcgcctgcctctggtgttaaggctattgttggtgatttctcgcgtgttcattggggtttccagcgcaatttcccgatcgagctgatcgagtatggtgatccggatcagactgggcgtgacctgaagggccataatgaggttatggttcgcgccgaggctgtgctgtatgtggctatcgagtcgcttgattcgtttgctgttgtgaaggagaaggctgcaccgactcctcctccggccccgaagcctgagcctaatcctccgtctggtaactgatacaagataagcgaatgtgtactatgtgcagggggtggtgttgatgggtatcattttgaagcctgaggatattgagcctttcgccgatattcctagagagaagcttgaggcgatgattgccgatgtggaggctgtggctgtcagtgtcgccccctgtatcgctaaaccggatttcaaatacaaggatgccgctaaggctattctgcgcagggctttgttgcgctggaatgataccggggtttcgggtcaggtgcagtatgagtctgcgggtcctttcgctcagactacacggtctaatactcccacgaatttgttgtggccttctgagattgccgcgttgaagaagctgtgtgagggtgatggtggggctggtaaagcgttcactatcacacccactattaatggtcgatatgtgcattctgaggtgtgttccacggtgtggggtgagggttgctcgtgcggatctgatattaacggctacgctggccctttgtgggagatatgatatgaccagttttccttatggtgaaacggttgtgatgcttcagccgactgttcgtgtcgatgatcttggcgacaaggtggaagactggtctaagcctgtcgagactgtgtaccataacgtggccgtttatgcttccgtttcgcaggaggatgaggcggctgggcgtgactctgactatgagcattggtcgatgctttttaagcagtctgttgtgggtgccggttatcgttgccggtggcgtattcggggtgttgtgtgggaggctgacgggtctcctatcgtgtggcatcacccgatgtctggctgggatgcgggcacgcagatcaatgtgaagcgtaagaagggctgatagattgtggctcaggatgtgaatgtgaagctgaacttgccgggtattcgtgaggtgttgaagtcttttggggtgcaggctatgttggctgagcgtggcgagcgtgtcaagcgtgcagcctcggcgaatgtgggcggtaacgctttcgataaggcccagtatcgtgcagggttatcatcggaggtgcaggttcaccgtgttgaggctgtggcccgtattggcaccacatataagggtgggaagcgtattgaggcgaagcatggcacgctggctcgttcgattggggctgcgtcgtgattgtttacggtgaccccaggaagtgggctaaacgcgtgctcaaggatgatggctggctgtctgggataccgtgtacagggacggtgcccgatgattttacgggtgatctgatttggttggctcttgatggtggcccgcagttgcatgttcgtgagcgtgtttttttgcgggtgaatgtgttttctgatatgccggatcgtgctatgtctttggctcgtcgtgttgaggctgtgctggctgatggtgtggacggtgaccctgtggtgtactgtaggcgttctactggacctgatttgctggttgatggtgcacgttttgatgtgtattcgctttttgagcttatatgtaggcctgcggagtctgaataagcttattgtttttgttttaatgtaattgtttgatatttaatgggggttatgatggctgcaacacgtaaagcgtctaatgttcgctctgctgttacgggtgacgtctatattggtaacgctcatgccggtgacactattgatggtgtgaagacggttcctgacggtcttaccgctttagggtacctgtcggatgacgggtttaagattaagcctgagcgtaaaacggatgatttgaaggcttggcagaatgcggatgttgttcgcactgtggctacagagtcgtctatcgagatctctttccagctgatcgagtctaagaaggaggttatcgaactgttttggcagtcgaaggttactgccggagccgattctggttcgttcgatatttctcctggtgccaccactggcgtgcacgccctgttgatggatattattgatggcgatcaggttattcgctactatttccctgaggtcgagttgatcgatcgtgacgagatcaagggcaagaatggcgaggtgtatgggtatggtgtgacgttgaaggcgtatcctgcccagattaataagaagggtgatgcggtgtctggtcgggggtggatgacggctttaaaagctgatactcccccggttcctccttctccgaagccggagcctcctaagcctgagccggatccgaatccgccgtctaataactgatacacatagtttgagggattgttgatagatgagtgacacaggttacacgttgaagattggtgaccgtagctgggtgttggcggatgcggaggaaacagcgcaggctgttcctgcccgcgtttttcgccgtgccgccaggattgcccagtctggggagtctgctgatttcgcccaggttgaggtgatgttttccatgttggaggctgccgccccagaggatgctgtggaggccttggaggggcttcctatggttcgtgtggccgagattttccgtgagtggatggaatataagcctgacggtaagggtgcctcgctgggggaatagtttggctccacggcctgattgatgattatcgtggggccatcgaatacgatttccgcaccaagtttggtgtttctgtttatagtgttggtggcccgcagatgtgttggggtgaggctgtccggctggctggcgtgttgtgtaccgatacgtctagccagttggcggcccacctgaatggttggcagcgcccgtttgagtggtgcgagtgggctgtgctggacatgctggatcattacaggtctgctaatagtgaggggcagccggagcctgtggcgaggcctacggatgagcgtagggcccggtttacgtctgggcaggtggacgatattttggcgcgtgttcgtgccggtggcggggtgtctcgcgagattaatattatggggtgaatagtgtatgtctggtgagattgcttccgcatatgtgtcgttgtatacgaagatgcctggccttaaaagtgatgttggtaaacagttgtcgggtgtgatgcctgctgagggtcagcgttcgggtagcttgtttgctggcgggatgaagttggcgcttggtggtgcggcgatgatgggtgccatcaatgttgctaagaagggcctcaagtctatctatgatgtgactattggtggcggtatagctagggcgatggctattgatgaggctcaggctaaactgactggtttgggtcatacgtcgtctgacacgtcttcgattatgaattcggctattgaggctgtgactggtacgtcgtatgcgttgggtgatgcggcgtctacggctgcggcgttgtctgcttcgggtgtgcagtctggcgggcagatgacggatgtgttgaagactatcgccgatgtgtcttatatttcgggtaagtcgtttcaggatacgggcgctatttttacgtctgtgatggctcgcggtaagttgcagggcgatgacatgttgcagcttacgatggcgggtgttcctgtgctgtctctgttggctaggcagacgggtaaaacgtctgctgaggtgtcgcagatggtgtcgaaggggcagattgattttaacacgtttgcggctgcgatgaagcttggcatgggtggtgctgcgcaggcgtctggtaagacgtttgagggcgctatgaagaatgttaagagcgccctgggctatcttggtgctacggctatggccccgtttttgaacggcctgcggcagatttttgttgcgttgaatccggttattaagtctatcacggagtctgtgaagcctttgtttgcgtcggtggatcaggggattcagcggatgatgccgtctattttggcgtggattaaccggatgccggctatgatcacaagaatgaatgcacagatgcgcgccaaggtggagcagttgaagggcatttttgcgagaatgcatttgcctgtccctaaagtgaatttggctgccatgtttgctggcggcaccgcagtgttcggtcttgtggctgccggtgtggggaagcttgttgcggggtttgccccgctggcggtgtcgttgaagaatctactgccgtcgtttggtgctttgaagggtgccgctggggggcttggcggcgtgtttcgcgccctgggtggccctgtcggtattgtgatcggcttgtttgcggcaatgtttgctacgaacgcccagttccgtgccgcggtgatgcagcttgtggctgtggttggccaggctttggggcagattatggccgctgtgcagcctgtgtttggtctaattgctggtttggtggcacggttggctcccgtttttggccagattatcggtatggttgccgggttggctgcgcagcttatgcctgtgattagtatgcttgtcgcccggctggttcctgttatcacgcagattattggtgcggtgacgcaggttgctgcaatgttgttgccggcgttgatgccggtgttgcaggctgttgttgctgtgatacggcaggttgttggcgtggtcatgcagttggtgcctgttttgatgcctgtgattcagcagattttgggtgctgtcatgtctgtgctgccacctattattggtcttatccggtcgttgatgcctgtgattgcggcggttatgcgtgtggtggttcaggttgttgcggttgtgatacaggtggtggcccgtattcttgctgttgtggctccgatggtggcggccgtggtcgggtttgttgcccgtattgttggtgctgtcgtgtcggctgtggcccgtgttattgccgctgttgcccgtgtcatctcgtgggttgttgcccattttgtgtctggtttggcgcgtatgggttcggtggttcaggctggctggaatcatattagggcgtttacgtctgcgtttattaacggtttcaagtcggtgatttctggcggcgtgaacgcggttgtggggttttttgcccggcttggttcttcggttgcctcccatgtgaggtctggttttaacgcggctcgtggcgctgtttcttctgcgatgaatgctatccggagtgttgtgtcttcggtggcgtctgctgttggcgggtttttcagttcgatggcgtctagggttcgtagtggtgctgtgcgcgggtttaatggtgcccgtagtgcggcttcttctgctatgcacgctatgggctcggctgtgtctagtggtgtgcatagtgtgatagggtttttccggaatctgcccagcaatattaggggcgctttgggtagtatggggtccctgttgatgtctgctggccgtgacgtggtggccggtttgggtaatggtattaagaatgctatgagtggcctgttggatacggtgcgtaatatgggttctcaggttgctaatgcggcgaagtcggtgttgggtattcattccccgtctcgggtgtttcgtgacgaggttggccggcaggttgttgctggtttggctgagggtattactggtaatgctggtttggcgttggatgcgatgtcgggtgttgcttcgcagcttccggatgctgtggatgcccggtttggtgtgcgatcgtctgtgggctcgtttaccccgtacgaccggtatcggcgtgctcagggtgagagtgttgtggtgaatgtgaatggcccgacgtatggtgatccggccgagtttgcgaagcggattgagcggcagcagcgtgacgctttgaacgcgttggcttacatgtgagtaaaggggtatgcatgtttattcctgacccgtctgatcgttctggtttgactgtgacatggtcgatggatccgcggtttggcgacgagcgtgtgcttcatttgacggattatacggggtcgtctcctgtcatgttgttgaatgattcgttgcgcggtttgggtgttcctgaggtggagcatttttctcaaacgcatgttggggtgcacggttcggagtggcgcgggtttaatgtgaagcctcgcgaggtgacgctgccggtgttggtgtcgggtgttgacccggatccggtgggcgggtttcgtgacggttttttgaaagcctatgacgagttgtggtctgcgtttcctcctggcgaggagggggagttgtctgtgcagactcctgccggtcgtgagcgtgtgttgaagtgccggtttgattcggtggatgacacgtttacggttgatccggtgaatcgcggctatgcccgctatgtgattcatttgacggcctatgacccgttttggtatggggatgagcagaagtttcgttttagtaacgctaagttgcaggattggctgggtggcggccctgtcggcaaggatggcacggcgtttcctgtggtgttaacaccgggtgtgggctcgggttgggataatctgtctaataagggtgatgtgcctgcgtggcctgtgattcgtgttgagggcccgttggagtcgtggtctgtgcagattgatggtttgcgtgtgtcttcggattatcctgtcgaggagtatgattggatcactattgatacggatcctcgccagcagtcggcgttgttgaacgggtttgaggatgtgatggatcgtttgacagagtgggagtttgcgcctatcccgcctggcggttcgaagagtgtgaatattgagatggttggtttgggtgccattgttgtgtcggtgcagtacaggtttttgagggcttggtgaatggttgatggctggtcttgttccgcatgtaacgttgtttacgccggattatcgccgtgtggcgcctatcaatttttttgagtcgttgaaactgtcgttgaagtggaatggtttgtccactttggagttggtggtgtcgggtgatcattctaggcttgacgggttgactaggccgggtgcacggctggttgttgattatggtggtggccagattttttctgggcctgtgcgtcgggttcatggtgtgggtccttggcagtcttcgcgggtgactatcacgtgtgaggatgatatccgcatgttgtggcgtatgctgttgtggcctgtgccttatcgttccagcatcattgggatggagtggcgtgccaatagggattatgcccactattcgggtgcggcggagtcggtcgctaagaaggcgttgagggataattcttggcgttttccgcctgatatatttatggtgaatgataagagtcgtggccgctatattaaggattttcaggcgcggtttcacgtgtttgccgataagttgttgccggtgttgtcgtgggctcggatgactgtcacggtgaaacagtttgagaatgtgaagcaggatcagcgtggtttactgtttgattgtgtgcctgctgtgacgcgtgagcatgtgttgactgccgagtctgggtctattgtgtcgtgggagtatgtgcgtgacgccccgaaggctacggcggtggttgtgggtggccgcggcgaaggcaaagatcgtctgttttgtgaggattttgacgcgttggccgaggatgagtggtttgatcgtgtcgaggtgtttaaggatgcccgtaacacggattctgagcatgtgcatctcattgatgaggcggagctggtgttgtccgagtcgggggccacgtcggggtttaagatcgagttggctgagtcggatgtgttgcggtttgggccaggcaatctgatgccgggtgatttgatctatgtggatgtgggctcggggcctattgcggagattgttcggcagattgatgtggagtgtgtatcgcctggtgacgggtggacgaaggtgactcctattgcgggggattatgaggataatccgtcggccctgttggctcgccgtgtggctgatttggctgcgggtgtgcgggatttgcaaaaattttagaaaagaatcgggggtttgttgtgggtattgtgtgcaagggttttgatggtgtgttgaccgagtatgattgggctcaaatgtctggtctgatgggtaatatgccgtctgtgaagggcccggacgattttcgtgtcggcactactgttcagggtgccacagtgttgtgtgaggtgttgccggggcaggcttgggctcacggggtgatgtgcacgtcgaatagtgttgagacggtgacagggcagctgcctggtcctggcgagacccgatacgactatgttgtcctgtctcgggattgggagcagaatacggccaagttggagattgttcctggggggcgtgcggagcgtgccagggatgtgttgagggctgagcctggcgtgtaccatcagcagttgttggcgactttggtgttgtcgtctaacgggttgcagcagcagttggataggcgtgctgtggcggcccgtgtggcgtttggggagtctgctgcgtgtgaccctacccctgtggagggtgaccgggtgatggtgccttcgggggctgtgtgggctaaccatgctaacgagtggatgctgttgtccccgcgtatcgagacgggttcgaagcagatccagtttggcgggtctgctgtgtatgcttacacgatcccgtttggccgcccgtttggtagtgcgcctgtggtggtggcgtctatggcgacggcggctggtggtacgcagcagattgatgtgaaagcctacaatgttactagcaagtattttcagttggcgtttatcacgaatgatggttctaagccttctgatgtgcctgcggttgctaactggattgctgtcggcgtgtaatgtacggcttgcgggtatgtgacgtgttgtggttgttgtagtggtagggggctgtagtgtcatggcttacacccacactcgtagcctctctttgtaccgctatcgctactgttcttggttcgattcaggcggctacgtacaggtcgaagaagaggctgaggcagttgtctgcgcaggttgatgcgatggaagaatacacgtggaatattcgccatactgttcaccgctataatgcgaatctgccggagaatgttgagccggtaaagatgcctgatttgcccgagtttttgaaggatactgttgatggtggtggggggtgaattgtgagggagttggaggaagagaagcggcagcgccgctcgtttgagaaggcttccatgatactgttgttcctgtcgcttgtactactggcggtggtcgccgggggtgctttacgtttcggtgctgtggcttcccagcgggattcggagcaggctaaagcccagtctaatggtacagccgctaaagggttggctagccgtgtgcggcaggtgtgtgcctctggcgggcaggagtcggtgcggcttcaccagtctggcttgtgtgtggatgctcagcgtgttgagcgtagcgtgcagggtgtgcctggtcctgccggtgtgcgtggcccgcaagggcctgcaggggttgacggccgggatggtgttgatggttcggctgggctggttggccctgttggcccgcagggttcccctggtttgaatggtgtgaagggtcctgacgggctgcccggtgctaacggttcggatggccgtgatggtgttgccggtgtgaacggggctgatggcaaggatggtgtgccaggtagggatggcgctgatggggctgatggtggccgcggccctgttgggcctcaggggccgcagggttctgccggtgccgatggcaaggacggtaaggatggcgctgatgggcgctcggtgatatcggtgtactgttccgggggccgcctggttgtgaaatatagtgacggtacggcctctaccatagcgggttcggtggcctgtgagggtgtgaaaccatcaccggtggttaccgtatcatcccacaagtaaaagaggaagtgtgttactagtgttgatagtagtgtttgggggtggcgtgttgtgagatacattccagcggcgcatcactcggccggatcaaataagccggtgaaccgtgttgtgattcacgcgacatgcccggatgtggggtttccgtccgcttcccgtaaggggcgggcggtgtctacagcaaactattttgcttccccatcgtcgggtggttctgcccattatgtgtgtgatgttggggagacggtgcagtgcttgtcggagtctacgattggttggcatgccccgccgaatccgcattctttgggtatagagatttgcgcggatgggggttcgcacgcctcgttccgtgtgccagggcatgcttacacgagggagcagtggctggatcctcgggtgtggcccgccgtggagcgtgccgccatcctgtgtcggcagttgtgtgacaagcatggtgttccgaaaaggaagcttagcgtatccgatttgaaggccggtaaacgtggtgtttgcgggcatgcggatgttacggatgcgtggcatcagtcggatcatgacgatccggggccgtggtttccgtgggacaggtttatggccgtagtctgcggcggtagtggagagagtgaggagttaactgtggctgatgtgaaagccttgcatgatcagattaaacaattgtctgctcagcttagtggttcggtgaataagctgcaccatgatgttggtgtggttcaggtacagaatggtgatttgggtaagcgtgttgacgccctgtcgtgggtgaagaatccggtgacggggaagctgtggcgcaccaaggatgctttgtggagtgtctggtattacgtgttggagtgtcgtagccgtcttgacaggcttgagtctgctgttaacggtttgaaaaagtgatggtggtttgttgtgggtaaacagttttggttaggtttactggagcgggcggctaagacttttgtgcaaacgtttgttgctgtgttgggggtgacggcgggtgtcacctatacggcggagtcgtttcgcggtttgccgtgggagtcggccctgataacagctacggtggctgcggtgttgtcggtggctacatcgtttggtagcccgtcgtttgtggccggcaagcccggcaagcctcagctggatgcgggtttggttccaccggatgatcccggaatagtggagcctcattcggtggatgtgtcggatcctggcatgatcgagccgatggatgaggctgatgttgccggctatgtgccgaagcgtgccgccgagtcggaggttggcacggtagagtctactgttgcataagtgaatatagatgtgtgccccagcggtgctgccacgatcgtgtggtggttgccgctggggcactatttttgtgtctatagtattctatgattcgttgctgtcgatggtttcttcgatcagctggtccaggtggatgcaggcggagatagtatcgttggcctggtgcagaacgttctggccgataacatttttataattgtcgcggtggcagatgatagactgcatgatatcgtcggcttccgcttgcaatagtttggcctggtatgcgattccggcgagccaatctatggcttcctggcttgcccgtgtgtcgtctggaatgccacgggtgttgctgttgtttgggtatcctgcactgtcgcagtcccacaagatttcgctgcactcgtctagcgtgtcctgatcgatagcgagatcgtcgaggctgacttctttgacggtaaggttcacgttgtcgagtgagatgggtacacggtactggttttcgacaccgtcaacaatgttttccaattgctgcatgttggtgggctgttgttggatgattcggtgtactactgttttgagggcggtgtaggggatattgtgtgtgttgtccatcgtgttatgccattccttcgttatcgtctggcatgtagtatgtgctgtttgcgtactcggttaacgtcatcagtgtttggtctgcccactgtttcacggtttgccgggtgactccgagtcgttgggctgccaccgaataggtttggtcatacccgtagacttcccggaacgctgccaacctagctagccgtttcctttgtttggatggctggcaggtgagggtgtagtcgtcgatggctagttgtagatcgatcatggtgacaatgttgttgccgtggtgttgtggcgcggtgggtggtggtggcattcctggttcaacactcggtttccatggtccgccgttccagatccattgcgcggcttggataatatcggctgtggtgtaggtccggttcatgtgtcatcccctgaataggttgtcgaggttgtctgggttgctggtgtcgaatcgtccgacgcagtggcagtagtcgtacatgagtttgatgatgtgttggtggtctcccaaataggtgtttccgctgatgctgtaggtggctgtgccgtctttactaatagtgtatttggcggtgatggtttcgggtgtttcggtgttggtgatgatggcggtggtggtggcgcctactgtttgtagcctggtggtttgggtgccgtcgtcgaggatggtggtgaccattatgattctccttagttgctggtttggttgtcggctagatgaataatatcggataaaggtttcggctggtctaaatgttgtgtggttttgttggctagccgtttggctaccctgtagcacattttggtgtagtgtttgttgtctaggttgtggtattgttcccgcaccgcaatatatagtagggagtcttggtagaggtcgtctgcgctgattgcggggtagtgtgtaaccactttggtgcatgcccggttgagtgtgcgtagatgatggtctgtggcccatccccacgatgcggtggtggctaggtctgcttttgttggtcgcctgctcatggcactattacctggctatctggtagttgtttggtgttttgttgttgatagtgtagcacacgagtccggggtttccggtggtgcccgtcttgtgccggaaccatgtggattcgccttccatggatgggcattggatgaaggtgcgtgtgccttgctcagagatttctaggtggtgccggtgcccggccatcaggatgtgggatgtggtgccgttgtggaattcttggccgcgccaccattcgtagtgtttgccggtgcgccattggtgcccgtgggcgtgcaggatttgtgtgcctgccacatcgacggtggtggtcatttcgtctcggctggggaagtggaagtgaaggttggggtattggttgttgagctggtaggcttctgcgatggcgcggcagcagtccacgtcgaaggagtcgtcgtaggtggtgactccttttccgaagcgtacggcttctccgtggttgccggggatggatgtgatggtgacgttggcgcagtggtcgaattggtggatgagttgcatcatggccatgcgggtgagccggatttgttccgtcaggggtgtttgtgtgcgccaggcgttgttgcctccttgtgacacgtatccttcgatcatgtcgccgaggaaggcgatgtggactcgttgcggtttgcctgcttgctgccagtagtgttttgcgacgatgagggtgtgtaggtagttgtcggcgaagtgtgctgtttctccgccggggatgcctttgccgatttggaagtctcctgccccgatgatgaaggctgcagtgctgtagtcggtgtgggtgtcttgttcgggttttggtggctgccattcggctagtttatcgacgagttcgtctatagggtaggggttggttgcgggttggtggtcgatgattttttgtatggatcggcctgtttctccgttggggagtgtccattcggagatgcgtgtgcggcgcacggtgccgttggctagattgtcgtcgatggtgtcgatggcgttgtcgtggttggctagctgtgtgaggagccggtctatgttgtctatcactgggtatcatcctcttcctcgtgtgtggtggtggcttgtttgcggcgatggtctttgataacggtggcggagatggggtatccggcttcagtgagcatttgggctagctgtgtggcggggatggacctgtcggcgaggacgtctgcggctttgttgccgtagcgttggatgagggtttcagttttggttgccatgatgtcctatcggttgtgtggtgggttgccatcctgtgcggcagtcgccgtcgtgtcctggtttgcgtgtgcaccatgagacttcgccggcattgtggatgatggcacggccgcatatgacgtcatgtaggtgttcgggaaacttatcgttgttgttgtccccgtacatgtcgatcaagtgttgggttttagtaaccatcatgtctcctatgtgtgaaagagtgtgcaaatactatgctggtgtcatggatgtttatgcgggtatggttttcatcaccttgctgaacgttacttggttactgtacatcatctgggtgatttcctgatccgttttgtcggggtgctgttttcgcaggtttgcccattggcaggcgttgtcggtttcctgctgtaaacgtgtcaggtgttgttcgttgatgatgtgtttccacattgtccacgagacgtcgagtcgtttgagcatgtcgatggctggcacgttgaaggagttgaggaagagtatttcctccgtgtagtagtctttttcgtattggtcccatccgcttcggtgcctgttgggctggtttttagggtaggcttcccggcatactttgtgcaaacgcttggccatgtctttgggtagcctaatgtcggggttggcgcggatcatggatcgcatcccatcataggtggtgccccaggtgtgcatgatgtggagtgggtcttcaccatcagcccatttttctgcacagatggcgaggcggatacgcctccgggcggctttgctagtgtcgcggcggccggggatggggcatgtgtcgagggggtccatgatgctttttatgcctttctttgtttggtttgcttgtgtggttttattgtagcactgtgtctagtgcttgtgtcaaccctgtttttccggcctgcaggtaggtgtctgtgacatcgcccagggtgaggggcacgcgggtggcttgggggagtgccgtctggagggtttgggccatctggtctcctgctttgtcggggtctgaccagatgtagatgtggtcgtagccttcgaagaatttggtccaaaagttttgccacgaggttgcgccgggtagggctacggccggccatccgcattgttcgaggatcatggagtcgaattcgccttcgcaaatgtgcatttcggctgccgggttggccatggcggccatgttgtagatggagcctgtgtcccctgccggggttagatatttggggtggttgtgggttttgcaatcatgctggagtgagcagcggaaacgcatttttcgtatttcggctgggccgtcccagacggggtacatgtaggggatggtgatgcactggttgtagtcttcgtggcctgggatggggtcattgtcgatgtatccaaggtggtggtagcgggctgtttcttcgctgatgcctcttgccgagagcaggtcgagtatgttttcgaggtgggtttcgtagcgggctgaggctttctggattcggcggcgttccgcaatgttgtagggttgtagtgagtcgtacattcgggttttctttctctaattgttgtttcagtttggcgaggcctcctccgatgccgcatgtgtggcagtaccagacgcccttgtcgaggttgatgctcatggagggctggtggtcgtcgtggaacgggcagaggatgtgttgctcgttcctggatggattgtaccgtatctggtaggtgttgaggaggcggcaggtgtcagaggtgtgggaggagctcgttgagggttgataccacataggcttcgctccatggcttgttgcgctgtttcatcactacgagtccgatggtggaattgttttctcggtttcggtgggtttcgtagttgcgtgcctcccggctggcttgtttcacgaattcggcgaggtgtgcctgtcctgctttggcttcgatcacataggttttgtggccggttgtgaggatgaggtcgccttcatcctctttaccgttgaggtggaggcgttctatatcatagccggtgtcgcgtagctggtggaggagtcgtgtttcccattcggctccggcccggcggttgcgtgcctgttgtgttgacatgatagtcctttgtggtgttcggtcatgttccatggctgtttttcggcgagtggcccgaagaatgtgtattcggggtaggctcgcagtcgttcgtatcgggtgccgtctgggctggatttgcctgtgcgctgtttgagtacggcgatgcgtgcctctgccggtatcgtgagcccgttgccgttatcttcgccaccatacagggagactcccaatatgagttgtggtttttcggagaggccgtttttgatttcccgcctagccggggggtgttcgatgtcggtgccggttttgtcggttgcgtggtgtgtgacaataatggtggagccagtatccctacccaatgctgtgatccattgcatggcttcttgctgtgcctggtagtcggattcgcagtcttggatgtccatcaggttgtcgatcacaatgagtggtgggaaggtgttccacatttccatgtaggcttgcagttccatggtgatgtctgtccatgtgatgggtgactggaatgagaatgtgatgtgttggccgtggtggatgctgtctcgatagtattctggcccgtagtcgtcgatgttttgttgtatctgggcggtggtgtgttgagtgttgagtgagatgattcgtgtggaggcctcccagggtgtcatgtcccctgatatgtagagtgcgggctggttgagcatcgctgtgatgaacatggctagcccggatttttggctgccggaccgccccgcgatcatgacgagatcccctttgtgaatgtgcatgtccaggttgcggtagaggggttctagttgtggtatgcggggcagttcggctgcggtttgggaggctctctcgaaggatctttggagagagagcatcggagccttaatctatctgtctatcggttggatgatgttttggtggtcagatggagtcgatgtcgatgtcagcatcagcaggggctgtggtgtcgtctagctggccgttatcgcgtttgtctacgtattcggcaaccttatcgtagatggcgtcgtctaatggtttgagcacgaccgcgttgaacccgtttttggtgcgcacggtggcgagtttgaatgcctgttcttcgccaaggtaggcttctaggtcgcggatcatggagtgtgggcggtcgttgttgccgcgggctttctcgataatggcgttggggatggtttctggggtgccgttgttgagatcgtctagggtgtggaagattgtgacatcagcgtagatgcgatcggcgacctgtccaccgtagccttcggtgttgtgctggacgtcgcggattttgaaggcgatggcggtggcgtcctggtttcgggaggggttgaagaaggtgctgttgctgttgttgcggtagtttgcgagtcccattgttgtttcctttactgttttgttggtttgtttgttggttttatcgggtgaggctgtttcgtttgctgcggaaagcctcggaaacgtcactgttactggtgatgatctttttgtactgtttgaggaggtcggctagctgtgctttgcttgttgcattgttgattttgtcgatgatggtgttgtttccttctgaggcgatgttgtctacgtagtctttggcggcctggttgtatcggtcttggaggattatggatgctgtggcgatcagtgttgccaggtcccagttccttgccgcggagctgtttttgagtccgccgaggaggtcgatgatagtcttctttacctggtcggcggtgtctccgcggatgacggtccatggggcggcgtagtcgcctccgtatttgagggtgacggtgaatcggtcgtcgtctgtgttgtcggtcactggtgctccttgtcttcttttgttggggctgtgatggtggtttctatggggtacctgtaggcgtctttcccgttgacagcccagcaggcgtccttgacggggcagcctttacagagtgctgtgacgtggggtacgaagatgccttggctgattcctttcattgcttgactgtacatggatgatacatgccggtaggtgttgttgtcaaggtcatagagttcggttgctgtgccttgtgtcggagactggtcgtcgttgcggctggtggctggcgtccaaaacatgcctttcgtcacatcgttgccgtgttggttgagcatgtaccggtatgtgtgcagctgcatactgtcggcgggtaggcgtccggttttgaggtccaaaatgaaggtttcaccggtgtcagtgtcggtgaaaacgcggtcgatgtagccgacaatagtggtgccatcctggagggtggtttctaccgggtattcgatgcccggctggccgtcaataacagcggtgatgtattctgggtggttgcgcctccatgttttccaccggttgacgaaggtggggccgtatatcatccaccaattgtagtcttttttgtgtggcccgcccgattcgcacatgtttttgcatattcggccggagggtttgatgtttgtgccttctgatttggcgagggcgacttgggtgtcgaaaatgtttttgaaggatgagagtttgtctggcagtgcagggtattcggcgggattgtacaggtgtaggtcgtattgttcggtgatgtggtgtatggcgcttccggcgatggtggcgtaccaggtgtggtgttgggtgtggtagccgtgggataggcgccatttttctccgcattcggcccactgggtgagtgaactgtaggagatgtggcctggatgatcaatggtggacggtttttgtgctagaggcattacttgtcgcctttgtgggtgttccatgggttacgggtgtcttggccggcgtggtgttgctggtatgcgaggagtgcgaggcagtgccaggcagcatgggctagatggggtagcccggattcatcatcgaggttgtttccttgctgccatgatagcaggtgcctgtagagggcgtcgacgctgtggctccacggatagccgccggtccagttgttgtcgccgtatttggtggcaccgtatcctgccacggagccgagggcgtgcaaggctgcggggtcgatgagggatagcctgcaaagtttcaattcttttttggcaccgctgttggggtcggtgtacatgcgggttggcttatccatgagatgtgtgctccttaggggtgggttactggttggggttgtgggcgagtgctacggcgagaataatgatggcgagggtttcagcgatcagtatgggtgttgtgatcatttagtgtttcggggattgttggtgagtgtggaggcgcctaggagggtggtgagggcgcatgcggcgatgatggcgagggctgccttgtgtggggtgccggttgcgtacatccatgtgatgatgccgccttggatccatgccagtgtggtgaagaaagtttcgtagctgtgtagctcaatgttgttgttgggtgtgttcatgcttgctcctgaagaatggtgttgatggttttgtaaatgttgtacaggtcggcttcgatggtttgtagctgtttgatttggtggtcgagatcaatgtctgggttgagggtgttgatgcgggaggcgatgtcggtggctgtgcgtagtgtgccgccggtgtggtgaatgatgtgtgccgtgtcggcgagtccggtggtgacggcgtagtgggagaggagaggcatagctggggggtgctccttggcgggttactgttgcgggttgatgttgaggtcggtgacgtgcgggtggtcttctgttccggtgacgaggcagtggacggtgacgggtagtttggatgctccgggctgtttcatggttgcgccgtagacgatggagaaggtgtctttgccaataattttgtggagttggaggtcgatgtcggggttgccgttccatttgacaccttgcgtggcggccttctgttcggctttgcggttgcaggtgtgtgcggcggtgatcatggtgagaccttgtgaggtttcttcaccccttgcctgggcttgcttgtgggttttggcctgctcggctcgcagtgactgttctgcggctgcctgccgtgccgctttctcggctttgcgctgttgggtggttttgggggtccattcggtgttggctgtggtggcctgtggggctggctgtgaggcgagtggcggattgtcgtctggggctggcatgaatgaggcggcggcgatgatggcggctgtgattccggcgatggtgtagcctgttttcttgttcatgactgttgtcccctttccggggtgttgttcgttgctgacatgatcaatcatggtgtgggcggttccccatgtcaaggctgcgctcaacgattgtgagcgatccttgtgtggctaggggtgatggcttctttcgcccaataggatgtgccaccgctggtccagtatccgagtttgttgcgctgcatgcccttcgcctccatctcgtccacggtgaggcacctgcggcgattggggcctgtcttgaccccgtggtcgcctacccggtgcatgtcgcctgaggtggtactcgtgaatgtctcgtgacagactgtgcagtgctctggcttgtatccgatgattgtgctatcgcacttgtggcatgtccattgcatgattgctcctattttccattataagacttcctgtagtgccattttagcgccttgcgagtcttgggggtacaactatataggtcaggtatttctaggcgattctaggctcattgtgtgcgactgggtgttatcgggcacacagggtgagcaggcttccgatgttgatgcggctcacattccagtagagttgtgtggcttcaccgccggtgagtggcttccactcgtcatggctgaacacggtgccatcggatgcgatgaatgtgttggggcgtagcttgtggagttcagtctctacgctctgccggtaggcttcggcgaggccctcaaaatccatgtggtcgcaggagaggttttcgaggcgtgtcaggtcgaaaggctcagggcagtccggggtgggggtgtaaagctgggtgaagtggttggcgatcttctgcatgacgggttccttttctcgtgtggtgggttgatagttttatcgtgtggcttcggcaatgatggcgtccacatcgatcatgtcgatgagatcgttgagttcctcggcctcgttctcggagaggtggcgccagtcgggtggcccgtatacggcaccgtcgagggtgacagtccacaggggccggatgagccgtacggcttcctcgactttggcacggtataggcggcagatgatagacgtgtgggtgttgcctatgtcacatcctgccaggtgtgcggggtggagtgggtggatttctgtctgcccgtagaggctggtgaaggatggtgtgatgagtgtgccatccatgagggtgtgctcctttcggtggtgtatgggttgttgtggtttctagagtgtgtagatggcgatcccatagtcaaggctgcgctcatttggattgagcgtttcatgggatgtggcaggggatgtggcgtatctcacttaagcctttatggcctctctcagcgcctgaaatcttctggcggtaggattatgcagggttgaccctgctaatcgattctaggggccttctagagcgtctcaggggtatgtctgggtgatagcgggtgtggcagatgatctagcgagtcaaggtgccgagctgagacataagatctatcatctaggtgtgtgagatgcatcacatcctcctggcgtggtgtacacccttaaggctactcggtcgatctggcgtggagggtgtagcccagaaatgccgtttaaagctgtgactcggtggattagagcgccttacagggtgggggctaggtatttatacccccaagcaattctgatcgattctagacgcctacaggagcccgatacacgatcagctatccagacgcagatcaccagtccctatcctggttagctcagcctacactatgtggacagtgtggaatactgtaggggaagaaggacacggtaaaagaaagagggaggcatcagccttcaagccttaaggtcttagcgcttagcaccgatggtcttagcagttagcaccgagcccctcaagggctcggcatcagcccgaacaggcacagccctgaaaggagtacacgccatcagggaaggcttgagagtacgaggagccctagcgacgagtactcgaaagcctgagggaacaccctcagcactgatgggcctagcgtgttcggaaaggacacaagagtgaagtgtgagagctgttcgggagtgaaacctgttctgactaggggtttcggtcttaaccaccctcaaaggttacaagactctaagaaaatttaaggaaaagtttaggtttaatttttggacctttactaccaaaaacacccgtttacacccctcaaacccgcctatagagccaaaaccaccagtttgactcatcccaggtggcatatgataggctggacaggtagccagctggacgcaaggccgaaatccgctgacgcggctttcacccttacatccatcagtctaccaaacactttaaagcttcaaggcttagcgctaagcccttaagaccttaacgcttagcaccgagcccctcaagggctcggcatcagtcttaaagctttaaacactttaagtaaacttaagagcttagcacttaaagttaattaataaccttaaaggcttagcacttaaggatataaacttaacatcagtgtttaagactttaaaacttaaaataactattaagacttaaagacttataagctttaaacacttaaagtaactataagactttaaagaccttaagtacttaaagttaaccatcagtcttaaactttaatattataacctataagtcttaaagcttataggtataataatataatataagttataaaagttttagaagagctaaggggttaacttctttacttctctactctctttggttctttctctcttctcttcttttcttcatcaggggagaagaggaacctttaccatcaacgctgatgggctttcaccgtgtgactcgtgtgcttctggtcgcacgctcccggttgcacactcaccacacttactctacctgtgtccctttcaggcttagcgtgttcggctgaaggcgtacggcgtgtcacgctaacacccttaacaccaggtaagacttaaagtgtatattataagtagaagactttaaaaccttaaggtgttcccgcttagcctgtgtcctttagcgctaggcgctaggcgctaagctgtgaaacgcgaacacccatccacccccttttttcttccgtgtccttcttcttttgacaccgctggggggcgatgtgatctttctcacactcatggggggtagtggagaaaacaaccaccccggcacaaacagaacaccccctcaaacgaacaaaacagcccctaggatcgatcagcagggcaagggcaaggtattcatacccccagacgattcccaggccgttacaggagcaatgagaggctcacaggggcaaggggagatcaggggacgtgatggcacataccaaccgcaccgcatccgcctcacaccggcgctggcggcaacgactcatcacccaagcccaacaacaaggccaaaccgaatgcccactctgcggagcaaccatcacctggggcacacacgatctaccaactagccccgaagccgaccacatcacacccgtcagcaggggaggactcaacaccctcgacaacgggcaaatcatctgcagaacatgcaacagaagcaaaggcaatcgcagcgaaccaaacatcaagttccaacaacaaaccacaaaaacattgattccatggtgaaaaacctgccaacccccaccggggacaccccctgcacacccgtgcaagacc

SEQ ID NO: 48 - DNA, 29492 bp, Bacteriophage of P. acnes
cctcccttttgtggattagtctatttgtcgactttttgcgttggtggtgagtgtggtgcagcctgagcttccggagagtcgcgattggtgtgaggagacgcgtcgttggtggcgtgtgtggggtgaggatagccgtgcccagtttgtgtctgacgaggagtggctgtttcttcttgatgcggctgtgattcatgatgtggtgtggagtgagggccgggcggatttggtggcttcgcttcgtgctcatgtgaaggcgtttatggccatgttggatcggtattcggttgatgtggcgtctggtggccgtggtgggggttctgcggtggcgatgattgaccggtataggaagcgcaagggggcctgattaggtgtctggtgttgttgggtctcaggttcctcgtcatcgtgtggctgcggcgtattcggtgtctgctggcggggatgcgggtgagcttggtagggcttatgggttgacgcctgatccgtggcagcagcaggtgttggatgattggcttgctgtgggtggtaatggcaggcttgcttcgggtgtgtgtggggtgtttgtgcctcgccagaatggcaagaatgctattttggagattgtggagttgtttaaggcgactattcagggtcgccgtattttgcatacggctcacgagttgaagtcggctcgtaaggcgtttatgaggttgaggtcgttttttgagaatgagcggcagtttcctgacttgtatcgtatggtgaagtcgattcgtgcgacgaatggccaggaggctattgtgttgcatcatccggattgtgccacgtttgagcgtaagtgtggttgtccgggttggggttcggttgagtttgtggcccgttctcgkggttcggctcgcgggtttacggttgatgatttggtgtgtgatgaggctcaggagttgtcggatgagcagttggaggctttgcttcctacggtgagcgcggctccttcgggtgatcctcagcagatttttttgggtacgccgcctgggccgttggctgacgggtctgtggtgttgcgtttgcgtgggcaggctttgtcgggtggtaagaggtttgcgtggacggagttttcgattcctgacgagtctgatccggatgatgtgtcgcggcagtggcggaagttggctggtgatactaatccggcgttgggtcgtcgtctgaattttgggactgtgtcggatgagcatgagtcgatgtctgctgccgggtttgctcgggagcggcttggctggtgggatcgtggacagtctgctacgtctgtgataccggccgataagtgggttcagtcggctgtgggtgaggcggctctggttggcgggaaggtttttggtgtctcgttttctcgctcgggggatcgtgtcgcgctagctggtgctggcaagactgatgctggggttcatgttgaggttattgatggcctgtctggcacgattgttgatggtgtgggccagctggctgactggttggcgttgcgttggggtgacactgaaaagatcatggttgccgggtctggtgcggtgttgttgcagaaggcgttgacggatcgtggtgttccgggtcgtggcgtgattgtggctgatactggggtgtatgtggaggcgtgtcaggcgttcctggagggtgtaaggtctggtgtggtttctcaccctagggctgattcgaggcgtgacatgttggatattgctgtgaggtcggctgtgcagaagaagaagggttctgcgtggggttggggttcctcgtttaaggatggttctgaggttcctttggaggctgtgtctttggcttatcttggtgcgaagatggcgaaggctaggcggcgtgaacggtctggtaggaagcgggtgtctgtggtatgaactcggatgagttggctctgattgagggcatgtttgatcgtatccaaaggttgtcttcgtggcattgccgtattgagggctactatgagggctctaatcgggtgcgtgatttgggggtggctattcctcccgagttgcagcgtgtgcagacggtggtgtcgtggcctggtattgctgtggatgctttggaggagcgtctggattggcttggctggactaatggtgacggctacggcctggatggtgtgtatgctgcgaatcggcttgctacgacttcgtgtgatgtgcatttggatgcgctgatttttgggttgtcgtttgtggctatcattcctggcggtgatggcactgtttctgttcgtccgcagtcaccaaagaattgtacgggcaagttttctgccgatgggtctcgtttggatgctggccttgtggtgcagcagacgtgtgatcctgaggttgttgaggctgagttgttgcttcctgatgtgattgttcaggttgagcggcggggctcgcgtgagtgggtcgagatgggccgtatcgtgaatgtgcttggtgcggttcctttggtgcctattgtgaatcgtcgccgtacgtctaggattgatggccgttcggagattacgaggtctattagggcttacactgatgaggctgtgcgcacactgttggggcagtctgtgaatcgtgatttttatgcgtatcctcagcgttgggtgactggcgtgagtgcggatgagttttcgcagcctggctgggtcctgtcgatggcttctgtgtgggctgtggataaggatgatgacggtgataccccgaatgtggggtcgtttcctgtcaattcgcctacaccgtattcggatcagatgcggctgttggcgcagttgactgcgggtgaggcggctgttccggaacgctatttcgggtttatcacgtctaacccacctagcggggaggctttggctgccgaggaatctcggcttgtgaagcgtgctgagcggcgtcaaacgtcgtttggtcagggctggctgtcggttggttttttggctgccaaggcgttggattctcgtgttgatgaggccgcgttttttggtgatgttggtttgcgttggcgtgatgcttcgacgcctacccgggcggctacagctgatgctgtgacgaagcttgttggtgccggtattttgcctgctgattctcgtacggtgttggagatgttggggcttgatgatgtgcaggttgaggctgtgatgcgtcatcgtgctgagtcgtctgacccgttggcggcactggctggggctatatcgcgtcaaactaacgaggtatgataggcgatggcttcgggggttgaggcgaggcttgctgcgactgagtatcagcgtgaggcggtcaggtttgctgggaagtatgcgggctattattctgagcttggtcgtttgtggcgtgccggcaggatgagtgacacgcagtatgtgcgtttgtgtgtggagttggagcgtgccggccatgatggttcggcgtcgttggctgccaggtttgtgtcggattttcggaagcttaacggtgtggatcctggtttgatcgtgtatgacgagtttgatgctgccgccgcgttggctaggtcgttttcgactatgaagattcttgagagtgacccggatagggcgaatgacacgattgatgcgatggcggcgggttttaatcgggctgtgatgaatgctggccgtgacacggttgagtggtctgcgggtgcgcagggtaggtcgtggcgcagggtgactgatggtgatccgtgcgcgttttgtgccatgttggctacgaggtcggattatacgacgagggagcgggcgcttactactggtcatactcggcgtcataagcgtgccggtaggcgtccgtttggttcgaagtatcatgatcattgtggttgtacggtggttgaggttgttggcccttgggaaccgaatagggctgatgccgagtatcagaggacgtatgagaaggctcgtgagtgggttgatgatcatgggttgcagcagtcgcctggcaatattttgaaggctatgcgtactgttggcgacatgagatgatggtttccggttgtgtgccgccggttattggtgcacagggttgtctcccgcacgggggtcaacaatgttgtgttgttttccgcaaggagtgtagggttaggctatggccgatcagagtgttgaggaacagaatgttgacaatgatgttgtggagtctggaaaggataacggcattgttgatacggtaaaagacgatggcgggcaggaggtagccgacaatcagttgaagaatgaaggcggtgataagccgtctgggactgattggaaggcggaggctcgcaaatgggagtctcgtgctaaaagtaattttgctgagctagagaagcttcgctccacgggtgataattcagagtctactattgatggtcttcgtcgtaaaaacgaggaacttgagagtaggctgaacgagcttgttttggagggtgtgaagcgtgaggtggccaccgagcatggcctctcggctgatgctgtagctttcttgtctggtggtgatcgtgagtcgcttgccgagtctgctaaagctcttaaggggctgattgaccatagtggtagtggtggcgctggtgtgcgccgtcttgcggggagtgcccccgtgactgatgagaagcatcgcgagggtgtcgctttcgtggatgctttagtaaacaattctaggagatgatttatcatggctgacgattttctttctgcagggaagcttgagcttcctggttctatgattggtgcggtgcgtgaccgtgctatcgattctggtgtgcttgctaagctgtcgccggagcagccgacgattttcgggcctgttaagggtgccgtgtttagcggtgttcctcgcgctaagattgttggcgagggcgaggttaagccttccgcatcggtggatgtttcggcgtttactgcccagccgatcaaggttgtgactcagcagcgtgtctcggacgaatttatgtgggctgacgccgattaccgtctgggtgtgcttcaggatctgatttcgcctgctctgggtgcctcgattggtcgcgccgtggatctgattgctttccatggtatcgatcctgctacaggtaagcctgctgcggctgtcaaggtgtcgcttgataatacgtcgaagacggttgatgcaaccgatagtgctacggctgatcttatcaaggcggttgggctgattgctggggccggtttgcaggttcctaacggtgttgctttggatccggcgttctcgtttgctctgtctactgaggtgtatccgaaggggtctcctcttgccggtcagccgatgtatcctgcagctggtttcgcggggcttgataattggcgtgggctgaatgttggtgcttcttcgactgtttcgggtgccccggagatgtcgcctgcttctggtgttaaggctattgttggtgatttctctcgtgttcattggggtttccagcgtaacttcccgatcgagctgatcgagtatggtgacccggatcagactggtcgcgatttgaagggccataatgaggttatggttcgtgccgaggctgtgctgtatgttgcgattgagtcgcttgattcgtttgctgttgtgaaggagaaggctgccccgaagcctaatccgccggccggtaactgatttattgtagcggtgatatgtatatgtgcagggggtggtgttgatgggtatcattttgaagcctgaggatattgagcctttcgccgatattcctagagataagcttgaggcgatgattgccgatgtggaggctgtagctgtcagtgtcgccccctgtatcgctaaaccggatttcaaatataaggatgccgctaaggctattctgcgcagggccctgttgcgctggaatgataccggggtttcgggtcaggtgcagtatgagtcggcgggcccgtttgctcagacgacacggtcgaatactcccacgaatttgttgtggccttctgagattgctgcgttgaagaagttgtgcgacgagagtggtggcgctggtaaagcgttcacgatcacacccacgatccgtggtggatatgctcattctgaggtgtgttccacggtgtggggtgagggttgctcgtgcgggtcgaatattaacggctacgctggccctttgtgggagatatgatatgaccagttttccttacggtgaaacggttgtgatgcttcaaccgactgttcgtgtcgatgatttgggcgacaaggtggaggattggggtcatcctgtcgagactgtgtaccataatgtggccatctatgcttccgtttcgcaggaggatgaggctgcggggcgtgactcggattatgagcattggtcgatgctttttaagcagcctgttgtgggtgccggttatcgttgccggtggcgtattcggggtgttgtgtgggaggctgacgggtctcctatcgtgtggcatcacccgatgtccggttgggatgctggtatgcaggttaatgtgaagcgtaagaagggctgatgggttgtggctcaggatgtgaatgtgaagctgaacttgccgggtattcgtgaggtgttgaagtcttctggggtgcagtcgatgttggctgagcgtggcgagagggtgaggcgtgcggcctcggcgaatgtgggcggtaatgcttttgatagggcccaataccgtaatggtttgtcgtcggaggtgcaggttcaccgtgttgaggctgtggcgaggattggcaccacctataagggtggtaaaaggattgaggcgaagcatggcacgttggcccggtcgattggggctgcgtcgtgatcgtttatggtgatccgcgtgtgtgggctaaacgtgtgctcaaggatgatggctggctgtccgatataccttgtactgggacggtgcctgaggatttcagcggtgacttgatttggttggcgttggatggtggtccgcagttgcatgttcgtgagcgtgtttttttgcgggtgaatgtgttttctgatatgccggatcgtgctatgtcgctagctaggcgtgttgaggctgtgctggttgatggggttgacggtgatcctgtagtgtactgtaaacggtctactggccctgatttgctggttgatggtgcacgttttgatgtgtattcgctttttgagctgatatgcaggcctgtcgaatccgagtaaacgttttgttttgatattgttgtttgtttttgtttgatattatttttgggggttgtgatggctgctacacgtaaagcgtctaatgttcgctctgctgttaccggtgacgtctatattggtgccgctcatgctggtgacactattgatggtgttgggaagattcctgacggtcttatcgctttagggtatctgtcggatgacgggtttaagattaagcctgagcgtaaaacggatgatttgaaggcttggcagaatgcggatgttgttcgcactgtggctacagagtcgtctatcgagatttcttttcagctgattgagtctaagaaggaggttattgaactgttttggcagtcgaaggttactgccggagccgattcgggttcgttcgatatttctcctggtgccaccacgggtgttcatgccctgttgatggatattgttgatggggatcaggttattcgctactatttccctgaggctgagcttgttgatcgtgacgagatcaagggcaagaatggcgaggtgtacgggtatggtgtgacgttgaaggcttaccctgctcagattaataagaagggtgatgcggtgtctggtcgggggtggatgacggctttaaaagctgatactcctccgactcctcctccggccccggttcctccgaagcctcagccggatccgaatcctccgtccgataactgatacacgattttaggggattgttgatagatgagtgacactggttacacgttgaagattggtgaccgtagctgggtgttggctgatgctgaggagacggcgcaggctgttcctgcccgcgttttccgtcgtgccgccaggattgcgcagtctggggagtctgcggatttcgcccaggttgaggtgatgttttctatgttggaggctgccgccccagctgacgcggtggaggccctggaggggcttcctatggttcgtgtggcggaggttttccgtgagtggatggaatacaagcctgacggtaagggtgcctcgctgggggaatagtttggctccacggcctgattgatgattatcgtggggccatcgaatacgatttccgcaccaagtttggtgtttctgtttatagtgttggtggccctgtgatgtgttggggtgaggctgtccggctggctggcgtgttgtgtaccgatacgtctagccagttggcggcccacctgaatggttggcagcgcccgtttgagtggtgtgagtgggctgtgttggacatgttggatcattacaggtctgctaatagtgaggggcagccggagcctgtggcgaggcctacggatgagcgtagggcccggtttacgtctgggcaggtggacgatattttggcgcgtgttcgtgccggtggcggggtgtctcgcgagattaatattatggggtgaatagtgtatgtctggtgagattgcttccgcatatgtgtcgttgtatacgaagatgcctggtttgaagtcggatgttggtaaacagttgtcgggtgttatgcctgctgagggtcagcgttcgggtagcttgtttgctggcgggatgaagttggcgcttggtggtgcggcgatgatgggtgccatcaatgttgctaagaagggtctcaagtctatctatgatgtgactattggtggcggtattgctcgcgctatggctattgatgaggctcaggctaaactgactggtttgggtcatacgtcgtctgatacgtcttcgattatgaattcggctattgaggctgtgactggtacgtcgtatgcgttgggggatgcggcttctactgcggcggcgttgtctgcttctggtgtgaagtctggcgggcagatgacggatgtgttgaagactgtcgccgatgtgtcttatatttcgggtaagtcgtttcaggatacgggcgctatttttacgtcgattatggcgcgcggtaagttgcagggcgatgacatgttgcagcttactatggcgggtgttcctgtgctgtctctgttggctaggcagactggtaaaacgtctgctgaggtgtcgcagatggtgtcgaaggggcagattgattttaacacgtttgcggctgcgatgaagcttggcatgggtggtgctgcgcaggcgtctggtaagacgtttgagggcgctatgaagaatgttaagagcgccctgggttatttgggtgctacggctatggccccgtttttgaacggcctgcggcagatttttgttgcgttgaatccggttattaagtctatcacggagtctgtgaagcctttgtttgcgtcggtggatcaggggattcagcggatgatgccgtctattttggcgtggattaaccgtatgccggctatgatcactcgaatgaatgcacagatgcgcgccaaggcggagcagttgaagggcatttttgcgaggctgcatttgcctgttcctaaggtgaatttgggtgccatgtttgctggcggcaccgcagtgttcggtattgttgctgcgggtgttgggaagcttgttgcggggtttgccccgttggctgtgtcgttgaagaatctgttgccgtcgtttggtgctttgaggggtgccgctggcgggcttggcggcgtgtttcgcgccctgggtggccctgtcggtattgtgatcggcttgtttgctgccatgtttgctacgaacgcccagttccgtgccgctgtgatgcagcttgtgggggttgttggccgggctttggggcagattatggtcgccttgcagccactgttcggtattgttgctggcgtggttgccaggttggcgccagtgttcggccagattatcggtatggttgctggtttggctgcccggctggtgcctgttattggtatgcttattgcccggctggttcctgttatcacccagattattggtatggtaacccaggttgctgccatgttgttgcctatgctgatgccggttattcaggctgttgttgctgtgatacggcaggttattggtgtcattatgcagttgatacctgttttgatgccggttgtgcagcagattttgggtgctgtcatgtctgttttgccgccgattgttggtttgatacggtcgctgataccggtgatcatgtcgattatgcgtgtggtggtgcaggttgttggtgccgtgctacaggtggtggcccgtattattccggttgttatgccgatttatgtttcggtgattggattcattgccaagatttatgctgcggttatcgtttttgaggctaaggttattggcgctattcttcgtactattacgtggattgtgaatcattcagtgtctggcgtgaggtctatgggcacggccatccagaatggctggaatcatatcaaatcgtttacgtcggcgtttattaacggtttcaagtcgatcatttctgccggtgttgccgcggttgtggggttttttacgcggcttggtttgtcggttgcctcccatgtgaggtctggttttaactcggcccgtggtgcggtttcttctgcgatgaatgctattcggagtgttgtgtcttcggtggcgtctgctgttggcgggtttttcagttcgatggcgtctcgtgttcggaatggtgctgtgcgcgggtttaatggtgcccggagtgcggcatcttctgctatgcatgctatggggtccgctgtgtctagtggtgtgcatggtgtgctgggttttttccggaatttgcctggcaatattcggcgtgcgcttggtaatatggggtctttgttggtgtctgctggccgtgatgtggtgtctggtttgggtaatggtatccggaatgctatgagtggcctgttggatacggtgcgtaatatgggttctcaggttgctaatgcggcgaagtcggtgttgggtattcattctccgtctcgggtgtttcgcgaccaggttggccgtcaggttgttgccggtttggctgagggtattactggtaatgcgggtttggcgttggatgcgatgtcgggtgttgcttcgcagcttccggatgctgtggatgcccggtttggtgtgcggtcgtctgtgggctcgtttaccccgtacgaccggtatcggcgtgcgagtgagaagagtgttgtggtgaatgttaacggacccacgtatggtgatcctaacgagtttgcgaagcggattgagcggcagcagcgtgacgctttgaacgcgttggcttacgtgtgattgggggtgttgtgcatgtttattcctgacccgtctgatcgtgccggtttgactgtggattggactatgtttccgttggttggtaatgctccggagcgtgtgcttcatttgacggattatacggggtcgtctcctgtcatgttgttgaatgattcgttgcgcggcctgggtgttcccgagattgagcatttttctcaaacacatgttggggtgcacggctcggagtggcgcgggtttaatgtgaagcctcgcgaggtgacattaccggtgttggtgtcgggtgttgacccggatccggatggcgggtttcgtgacggttttttgaaggcgtatgacgagttgtggtctgcttttcctcctggcgaggagggggagttgtctgtgaagactcctgccggcattgagcgtgtgttgaagtgccggtttgattcggctgatgacacgtttacggtggatccggtgaacaggggttatgcgcgttatctgttgcatttgacggcttatgacccgttttggtatggggatgagcagaagtttcgtttcagtaacgcgaagttgcaggattggttgggtggcggccctgtcggcaagaagggtacagcgtttcctgtggtgttgacgcctggtgttggttcgggttgggataacctgtctaataagggtgatgtgcctgcgtggcctgtgattcgtgtcgagggccctttggattcgtggtctgtgcagattgatggtttgcgtgtgtcatcagactatcctgtcgaggagtatgattggatcactattgacacggatcctcgcaaacagtctgcattgttgaacgggtttgaggatgtgatggatcgcctgtctgagtgggagtttgcgcctattcctccggggggttctcggagtgtgaatattgagatggttggtttgggtgccattgttgtgtcggtgcagtacaggtttttgaaggcttggtgaatggttgatggctggtcttgttccgcatgtaacattgtttacgcctgattatcgccgtgtggcgcctatcaatttttttgagtcgttgaaactgtcgttgaagtggaatggtttgtccactttggagttggtggtgtctggggatcattccaggcttgacgggttgacgaggccgggtgcacggctggttgttgattatggtggtggccagattttttctgggcctgtgcgtaaggttcatggtgtgggtccgtggcgttcttcgcgggtgactatcacgtgtgaggatgatattcgtctgttgtggcgtatgttgatgtggcctgtgaattatcgtcctggtttggttggtatggagtggcgtgccgacagggattatgcccactattcgggtgcggctgagtcggtggctaagcaggtgttgggggataatgcttggcgttttccgcctggtttgtttatgaacgatgatgagagtcgtggccgctatattaaggattttcaggcccggtttcacgtgtttgccgataagttgttgccggtgctgtcgtgggctcggatgactgtcacggtgaaccagtttgagaatgtgaagtttgatcagcggggtttggtgtttgattgtgtgcctgctgtgacacggaagcatgtgttgactgccgagtcgggttcgattgtgtcgtgggagtatgtgcgtgacgcccctaaggctacttcggtggttgttggtggccgcggcgagggtagggatcggctgttttgtgaggatgttgattcgatggccgaggatgagtggtttgatcgtgtcgaggtgtttaaggatgcccgtaacactgattccgagaaggtgtctctctttgatgaggccgagcaagtgttgtccgagtcgggggcctcgtctgggtttaagatcgagttggctgagtcggatgtgttgcggtttgggcccggcaatctgatgccgggggatttgatctatgttgatgtgggttctggccctattgcggagattgttcggcagattgatgtggagtgtgattcgcctggtgatggttggacgaaggtgacaccggttgcgggggattatgaggataatccgtcggcgttgttggcgcggcgtgtggctggtttggctgcgggtgtgcgggatttgcaaaaattctaaaaagattaggggtttgttgtgggtattgtgtgtaaaggttttgatggtgtgttgaccgagtatgattgggctcaaatgtctggtctgatgggtaatatgccgtctgtgaaagggccggacgattttcgtgtcggcacgacgattcagggtgccacggtgttgtgtgaggttatgccggggcaggcttgggctcacggggtgatgtgcacgtcgaatgatattgagacggtgacggggcagcttccgggcccgggtgagacccgctacgactatgttgtcctgtcgcgggattgggaggcgaatacggccaggttggagattgttcccggtggccgtgcggagcgtgcccgtgacgtgttgagggctgagcctggcgtgttccatcagcaactgttggcgactttggtgttgtcgtctaacgggttgcagcagcagcttgacaggcgtgccgtggcggctagggttgcgtttggggagtctgcygcgtgtgatcctacccctgtggagggtgaccgggtgatggttccttcgggggctgtgtgggctaaccatgctaacgagtggatgctcctgtctcccaggattgagacgggttctaagcagatccagtttggcgggtctgctgtgtatgcttacacgatcccgtttgatcgcccgttcactagtccgcctgttgtggtggcgtctatggctacggcggctgggggcacgacccagattgatgtgaaagcctacaatattactgccaaggattttagtttggcgtttattacgaatgacgggtctaagccgaatggtgtgcccgcaatagctaactggattgctgtcggcgtgtgactgtacaggtgttgtggcggatgttgtaatgttggggggctgtggtgtcgtggtttactcctgcactggtggcctctatctgtaccgcgttggccacgattttgggttcagttcaggcggtcacatctaaatcgaggaagcgtttacgcaggctatctgcgcaggttgatgcgatggaagagtatatgtggggtgtgcggcgtgaggtgcgccggtttaacgcgaggcttcctgatggggtggagcctatgcatcttcctgatttgcctgagtttttgaaagatactgttgatggtggaggtgagtagggttgagggagttggaggaggagaagcggcagcgccgcaattttgagaaggcttcactggtgttgttgtttttgtcgcttgtgctgttgatggtggttgctgggggtgctttgcgtttcggatcgctgtcttctgagcgggattctgagcaggcgagggcccagtcgaatggtacagccgctaaaggtttagctgcccgtgtgaagcaggtgtgtgcctctggtgggcaggagtctgtgcggcttcaccagtctggcttgtgtgtggatgctcagcgtgttgaackgmgtgtgcagggtgtgccgggtcctgccggtgtgcgcggcccgcaagggcccgccggtgtgaacggccgggatggtgttaatggttcggccgggctggttggccctgttggtccgcagggttctccgggtttgaatggtgtgaagggtcctgacgggctgcccggcagtgacggccgggatggtgtcgatggtgtttcgggccgtgcaggcgtggacggtgtgaacggcgctgatggcaaggatggtcgtgatggttctgctggtgagcgtggcgatgtggggccttcgggtcctgccggcccccctggcgcgcagggtgagcgtggccctgctggtgtgaacggatccgatggtaaagatggtaaggatggcgctgatgggcgttcggtgatatcggtgtactgttccgggggccgcctggttgtgaaatatagtgacggtacggcctctaccgtgtcgggttctgcagcctgtgagagtgtgaaaccgtcacctgtggttaccgtatcatcccataggtgaacaagaagagggaagggtgttactagtgttggtcgtgtttgggggtggtgtgtggtgagatacattccagcggcgcatcactcggccggttcgaatagtccggtgaatagggttgtgattcatgcgacatgcccggatgtggggtttccgtccgcttcgcgtaagggtcgggcggtgtctacggcgaactatttcgcgtccccatcggcgggcggttcggcgcattatgtgtgtgatattggggagacggtgcagtgcctgtcagaggggactattgggtggcatgccccgccgaatccgcatagtttgggtatagagatttgcgctgatggtggttcgcacgcctcgttccgggtgccagggcatgcttacactcgtgagcagtggcttgatccgagggtgtggcctgccgtggagaaggccgccatcctgtgtagacatttgtgtgacaaatataacgttccgaaaaggaagcttagtgcagccgatttgaaggccggtaaacgtggtgtttgcggccacgtggatgtgacggatgcgtggcatcaatcggatcatgacgatccggggccgtggtttccgtgggacaggtttatggccgtcgtctgcggcggcagtggagatagtggggagttaactgtggctgatgtgaaagccttgcatgatcagattaaacaattgtctgctcagcttactggttcggtgaataagctgcaccatgatgttggtgtggtacaggtacagaatggtgatttgggtaaacgtgttgatgccctgtcgtgggtgaagaatccggtgaccggaaaactgtggcgcacaaaagacgccctgtggagtatctggtattacgtgctggagtgtcgcagccgcatcagtaggctggagtctgctgttaacggtttgaaaaagtgatggtggtttgttgtgggtaaacagttttggttaggtttactggagcgggcggctaagacttttgttcaaacgtttgttgcggtgttgggggtgacggcgggtgtcacgtatactgcggagtcgtttcgcggtttgccgtgggagtctgccctgataacagcaacggtggctgcggtgttgtcggttgctacatcgtttggtagtccgtcgtttgtggccggcaaacctaaaaccacggttgtggatgctgggcttgttccacccgacgatgggggtttggttgagcctcactcggttgatgtgtcggatcctggcatgattgagcctgtagatgatgcggatcttggtgtgggctatgtgccgaaacacgctgccgagtcggaggttggcacggtagagtctactgttgcataagtgaatatagatgtgtgccccagcggtgctgccacggttgtgtggtggttgccgctggggcactatttctgttttatgcggtgtggctatgattcgttgctgtcgatggtgtcttcgagcatctggtacaggtggaggcaggtgcagatcgtttcgctggcctggtctagaacgttccggccgataacgtttttgtggttgtcgcggtggcggatgatagcccacatgatctcgtcggctgccgcctgtaatagtttggcctggtatgcgattccggcgagccagtctagtgcttccgggcttgcctgtgtgtcgtctggaatgccgcgggtgttactgttgcttgtggggtgtcctgcactgtcgcatagccataggatttcgctgcactcgtctagcgtgtcttggtcgatagcgagatcgtcgaggctgacattgttgacggtaaggttcacgttgtcgagggagatgggtacaccgtactggttttcgacactgtcaacaatgttttgtagttgttgcatgttggtgggctgttgttggacgatacggtgtatcgctgtgttgagggtggtgtaggtgatgttgtgtgtgttgttcatggttttatcccatccctgtgctgtcgtcgttttcgtctggcatgtagtatgtgctgtttgcgtactcggttaacgtcatcagtgtttggtctgcccactgtttcacggtttgccgggtgacacccaatcgttgggcggctgtggcgtaggtttggtcgtatccgtagacttcccggaatgctgccaacctagctaaatgttttcgctgtttggatggttcacaggatagtgtgtagtcgtcgatggctagctgtagatcgatcatggtggcaatgttgttgccgtgatgctggggggcggttggtgggggtggcattcctggctccacggagggtttccatgggccgccgttccagatccattgcgcggcttgaatgatgtcggcggtggtgtaggttcggttcactggtcatcccctgaacaggtcgttggtgttggtggtgtcgaatcgtccgacgcagtggcagtagtcgtacatgagtttgataatgtgttggtggtctcccaaataggtgtttccgctgatgctgtaggtggctgtgccgtctttactaatggtgtatttggcggtgatggtttcggggttttcggtgtcggtgatgattgctgtggtggtggcgcctactgtttgtagcacggtggtttgagttccgtcgtcgatggtggttttaaccatggtgtgtgttctcccctttcagttgctggtttggttgtcggctagatgaatgatatcgggtaagggtttcggctggtcgaggtgttgtatggttttgttggctaaacgtttggctaccctgtaacacattttggtgtagtgtttgttgtctaggttgtggtattgttcccgcaccgcaatatatagtagagagtcttggtacaggtcgtctgcactgattgcggggtagtgtgcggctgttttggtgcatgcccggttgagtgtgcgtagatgatggtctgtggcccaaacccacgatgcggtggtggcgaggtctgctttggttggtcgtcggctcatggcatctctttcatcgggctatctggtagttgtttggtgttttgttgttgatagtgtagcacacgagtccggggtttccggtggtgcccgtcttgtgccggtaccatgtggattcgccttccatggaggggcattggatgaaggtgcgttgtccttgctcggagatttctaggtgatgccgatgcccggccatgagaatattagatgtggtgccgttgtggaattcttggccgcgccaccaatcatagtgtttgccggtgcgccattggtggccgtgggcgtgcaggatggtagccccggctacgtctacggtggtggtcatttcgtctcggctggggaaataaaagtgtaggttgggatactggttgttgagctggtaggcttctgcgatggcgcggcagcagtccacatcgaaggagtcgtcgtaggtggtgacgcctttgccgaatcgtacggcttcgccgtggttgccggggatggatgtgatggtcacgtttttgcagtggtcgaacatgtggacgagttgcatcatggccatgcgggtgagcctgatttgttccgtcaagggggtttgtgtgcgccaggcgttgttgccgccttgtgacacgtatccttcgatcatgtcgccgaggaatgcgatgtggactcgctcgggtttgcctgcttgttgccagtagtgttttgcgacgatgagggagtgtaggtagtcgtcggcgaagtgtgatgtttctccgcctgggatgcctttgccgatttggaagtctcctgccccgatgacgaaggctgcggtgctgtagtcggtgcgggtgtccggttcgggttttgggggtgcccattcggctagcttgtcgacgagttcgtctacagggtaggggttggttgcgggttggtggtcgatgattttttgtatggatcggccggtttctccgttcggtaaggtccattcagagatgcgtgtgcggcgcacggtaccgttggctagattgtcgtcgatggtgtcgatggcgttgtcgtggttggctagttgtgtgaggagccggtctatgttgtctatcactgggtatcctcctcgtgtggggtggtgttggcttgtttgcggcggtagtctttgatgacggtggcggagatggggtatccggcttgggtgagttgttgtgctagccaggaggcgggtatggacctgtctgcgagcacgtctgcagccttatcgccgtagcgttggatgagggtttcagttttggttgccatggtgtcctatcggttgtgtggtgggctgccatcctgtgcggcagtcgccgtcgtgtcctggtttgcgtgtgcaccacgatgttgttccgtctgtgtggttgagtgttttaccgcacatgacgttttgtagatgctctggcagctggtcatcctggttgctggtttgtgtgtcgaagagtgttttttggttggtgaaatgctcggacacggtgccgttrtgcacgggtagtatccatgttttccattgttgttgtagccgggtgttccagtggaattgtttggccgcgttttcggcctgttttaaggttttgtagtagccgactagtatgcgctggtgttcactgtcgggtgggttttggcctcgccagtattgtgccgctacggcgtaccggttgctggctgtgaagatttgccagcagtattcgataatgtgttgcaatactgtgtctggcaggctgtcggggttgatggtgatgttttgggtgatgatgccacggatggcttgccggtttttggtggtgggtttgaacgagatgctcacgatagtaccggctgctggtcttgcatgaactggttgaaggtgttgttcccggcatgttgggcttgtgtgatttgttggtcagaccagtcggggtgttgctgtttgaggtagtgccagtggcacgcattgtaggtttcgttttgtagccgtgtgagatggttttcggtgatgatttgtttccacattgtccatgatacgtctagccggtcgaggatttcaagggctgggatgttgaattggtcgaggaagaggatttcgtgggtgtagtagtttttctcgtattggtcccatccgcttcggtgcctgttggactggtttttggggtaggcttcccggcatactttgtgtaaacgtttggtcatgtcgtcgggtaggttaatgtcggggttggcgcggatcatggatcgcatcccatcataggtggtgccccaggtgtgcatgatgtaggtggggtcttctccgtcagcccatttttctgcacagatggcgaggcggatacgcctcctggctgcttggctaatgttgcgccggttggggatggggcacgtgtcgaggggatccatgatgttttagtgtacctttctagtttcgtgttgttgacgtgttttactgtagcacagtgtctagtgcttgtgtcaaccctgtttttccggcctgcaggtaggtgtctgtgacatcccccagggtgaggggcacatgggtggcttggggtagtgctgcctggagggtttgggccatctggtctcccgctttgtctgggtcggaccagatgtagatgtggtcgtagccttcgaagaatttggtccaaaagttttgccacgaggttgcgccgggtagggcgacggccgaccatccgcattgttcgaggatcatggagtcgaattcgccttcgcaaatgtgcatttcggctgccgggttggccatggcggccatgttgtatatggagcccgtgtctcctgccggggttaaatatttggggtggttgtgggttttgcagtcgtgctggagtgagcagcggaaacgcatttttcttatttcggctgggccgccccaaacggggtacatgtatgggatggtgatgcactggttgtagtcttcgtggcctgggatggggtcattgttgatgtatccaaggtggtggtagcgggctgtttcttcgctgatgcctcttgccgagagcaggtcgagtatgttttcgaggtgggtttcgtagagggccgaggctttctggattcggcggcgttccgcaatgttgtatgggcgtatgctgtcgtacattcgggttttcttcttctaatcgttgttgtagtttggcgagtccgcctccgacaccgcatgtgtggcagtaccagacgcccttgtcgaggttgatgctcatggagggctggtggtcgtcgtggaacgggcagaggatgtgttgctcgtttttggacggattgtagcgtatctggtaggtgtcgaggaggcggcaggtgtcagaggtgtgggaggagctcgttgagggttgataccacatatgcttcgctccatggcttgttgcgctgtttcatcactacgagtccgatggtggactggctttctcggtttcggtgggtttcgtagttgcgtgcctcccggctggcttgtttcacgaattcggctaggtgtggctggccggctttggcttctatcacataggttttgtggctggttgtgaggatgaggtcgccttcatcctctttaccgttgaggtggaggcgttcgatattgtggccggtgtcgcgtagctggtggaggagtcgtgtttcccactcggccccagctcgcctattcctggattgctgtgtagccatcatagtcctttgtgtgttgtggtcatgttccagggctgtttttcggcgagtggcccgaagaatgtgtattcggggtaggctcgtagccgctcgtatcgggttccgtcggggctggatttgcctgtgcgctgttttagcactgcgatgcgtgcctctgccggtatcgtgagcccgttgccgttatcctcgccaccatacagtgagactccgaggatgagttgtggtttttcggagaggccgtttttgatttctcgccgggcgggcgggtgttcgatgtcggagccggttttgtcggttgcgtggtgggtgacgatgatggtggagccagtatctctacctaatgctgtgatccattgcatggcttcttgctgggcctggtagtcggattcgcagtcttgaatgtccatcaggttgtcgataacgatgatgggtgggaaggtgttccacatttccatgtaggcttgcagttccatggtgatgtcggtccaggtgatgggtgactggaatgagaatgtgatgtgttggccgtggtggatgctgtctcgatagtattctggcccgtagtcgtcgatgttttgttgtatctgtgtggtggtgtgttgggtgttgagtgagatgattcgtgtggaggcctcccagggtgtcatgtcccctgatatgtagagggctggctggttgagcatggcggtgatgaacatggctagccctgatttttggctgccggagcgccccgcgatcatgactaggtcccctttgtggatgtgcatgtcctggttgcggtagaggggttctagctggggtatgcggggcagctcggctgcggtttgggaggccctctcgaaggatctttgtagagagagcatcggagccttaatctatctatcggttggatgttgttttggtggtcagatggagtcgatatcgatgtcagcctcagttgaggctgtggtgtcgtctagctgaccgttatcgcgcttgtctacgtattcggcaaccttatcgtagatggcgtcgtctaatggtttgagtacgaccgcgttgaacccgtttttggtgcgtacggtggcgagtttgaaggcctgctcttcgccaaggtatgcttcgagttcgcggatcatggagtgtgkgcggtcgttgttgcctcgcgctttctcaataatagcgttggggatggtttctggggtgccgttgttgagatcgtctagggtgtggaagatggtgacatcagcatagatgcgatcagcggtctgtccgccgtagccttcagtgttgtgttccacgtcgtgcactttgaaggcgatggcggtggcgtcctggtttttggacgggttgaagaaggtgctgttattgctgttgcggtagttggcaagtcccataatggtgttatcctttactgttgtgtctgttattgttggcttatattggtttatcgggtgaggctgtttcgtttagtgcggaaagcctcggacacgtcactgttactggtgatgatctttttgtactgttttagaaggtctgctagctgtgctttgctggtggctttgttgatccggtcaatgatgatgtcgttttcctgattggcgattttgtttacgtagtctttggcggcctgattgtatcggtcttggaggatgatggatgcgctagctatgagggttgcgaggtcccagtctttcgatacggtttcgtctttcaatcctcccagcaggtcgatgatggcctgttttgtctgctctgctgtgtctcccctaatgacggtccatggtgcagcatagtctccaccatatttgagtgtgatagtgagtcgatcattgtctgtggtgtgctcgtcggtcatgtgttttccttttctttgttttcggcttctggaggctgtacggtggtttctaccgggtatctgtacgagttttttccgttgacggcccagcaggcgtctcgtacggggcatcctttacagagtgctgtgacgtggggtacgaagatgccttggctgattcctttcattgcttgactgtacatggatgatacatgccggtaggtgttgttgtcaagatcgtacagttcggtggatgttccctgcttggcggactgtttgtctgttttggttgatgcgggtgtccaaaacatgccttttgtcacatcgttgccgtgttgggcgagcatgtaccggtaggtgtgcagctgcatactatcagccggtaggcgcccggttttgaggtcgaggatgaatgtttcgccggtgtcggtgtcggtgaaaacgcggtcaatatatccgactatttttgtgtcatcgtcgaggatggtttctaccgggtattcgatgcccggctcgccgtcaataacagcgatagcatattctggatggttgcgcctccatgttttccagcggttcacaaaggtttgtccgtagagtatccaccagtcgtagtctttcttgtgtggcccgcccgactcgcacatgtttttgcatattctgccggagggtttgatttctgtgccttcggatttggcgagggcgatttgggtgtcgaaaatgtttttgaaggatgagagtttgtctggtagtgcagggtattcggtgggattgtacaggtggaggtcgtattgttcggtgatgtggtgtatggcgcttccggctatggtggcataccaggtgtggtgttgggcgtggtagccgtgttggaggcgccatttttctccgcattcggcccactgtgacagtgatgagtaggagatgtggcctggatggttgatggttttcggatattgtgctagaggcattacttgtcgcctttgtgggtgttccatgggttgcgggtgtcttggcctgcatcgtgttgctggtaggcaaggagtgcgaggcagtgccaggcagcatgggccagatgcggtagcccggattcatcatcgaggttgttgccttgctgccaggatagcacatggcggtagagggcatcgacactgtggctccacgggtatcctccggtccagttgttgtcgccgtatttggtggcaccgtagcctgcaacctcgcctagggcgtgcaaggctgcggggtcgatgagggagagcctgcagagtttcaattcttttcgggcaccgctgttggggtcggtgtacatgcgggtgggctcatccatgagatgtgtgctccttaagagtgggttactggttgttgtcgtgagctagggcgacggcgagaataatgatggcgagggtttcggctatcaggatgggtgttgtgatcatttagtgtctcggggatggtaggtgagtgttgaggcgcccaggagggtggcgagggcgcatgcggcaataatagcgagggcggctttgtggctggtgccggttgcgtacatccatgtgatgatggcgccttggatccaggcgaggctggtgaagaacgtttcgtagctgtgtagctcaatgttgttgttgggtgtgttcatgcttgctcctgaagaatggtgttgatggttttataaatgttgtacaggtcggtttcgatagataacagttgatggatttcgtggtcgagatcaatgtctgggttgagggtgttgatgcgggaggcaatatcggtggctgtgcggagtgtgccgccggtgtggtgaataatgtgtgccgtgtcggcgaggcctgtggtgacagcgtagcgggagaggagaggcatagcggtccttgacggggttactgttgcgggttgatgttgaggtcggtgacgtgcgggtggtcttctgttccggtgacgaggcagtggacggtgactggtagtttggatgctcccggctggcggacggtggcgccgtagacgatggagaaggtgtctttaccaataattttgtggagttggaggtcgatgtcggggttgccgttccagttgacaccgtgtgcggcggccttctgctcagccttgtcattgcaggcgtgtgctgcggtgatcatggtgagtccggtggcggtttcttctccgcgggcttgggcttgcttgtgggttttggcttgttcggcttgtagggagcgggtggcggctgcctgccgtgccgctttctcggctttgcgctgttgggcggtttttggtgtccattctgtgttggctgtggttacctgtggtgcgggttgtgatgcgagtggggggttgtcgtcgggggctgggaggaaggatgcggcggcgatgatggcggctgtgatgcctgcgatggtgtagccttttttcttgttcatgactgttgtcccctttctggggtgttgttcgttgctgacatgatcaatacttccagtgactggacctcgtgtcaagactgcgctcaaatgttgtgagcgatccttgtgtggctaggggttttatcgggcacacagagtgagtagatggcctacgttgatgcggctcacattccagtagagttgtgtggcttcaccgccggtgagtggcttccactcgttgtggctgaacacggtgccatcggatgcgatgaatgtgttggggcgtagcttgtggagttcaatctctacgctctgccggtaggcttcggcgaggccctcaaaatccatgtggtcgcaggcgaggttttcgaggcgtgtcagatcgaagggtgtggggcagtcgtagctggcgggggtgtagagctgggtgaagtggtcggcaatcttgtgcatgatgatgtccttttcgttgctgataacgttgttgagggtttatcgggtggatgctttgaggatggcgtctacatcgatcatgtcgatgagatcgtggagttcctcagcttcgttctcggagaggtggcgccagttgggtggcccgtatagggcgccgtcgagggtgacagtccacatgggtcggatgagtcgtacggcttcttgtactttagcgtggtacatgcggcgcaccatatcgagatcgatgtcgtctgaatggtttccggtgaggctgtggaggctgagtgggtcgatttctgtctgcctgtagagggatgtgaaggatggggtgatgagtgtgccatccatgggtgatgttcctttctggattgtctgggtgggttgttgtggtttttatggtgtgagggttgtgatccatagtcaaggctgcgctcattcggattgagcgtttcatgctggagtgtctggtgtgacagatgtcacttaagcccttatggtctctctaagcgtctcaaatcttctgggggtaggattatgcagggttgaccctgctaatcgattctagggcccttctagggcgtctcaggggtatgtctgggtgatggcaggttcggtagatgatctagcgagtcaaggtgccgagctgagacataagatctatcatctaggtgtgtgagatgtatcacatcctcctggcttagtgtgcactcccgaggctactctgccgatctgacgtgaagggcgtagcccagaaatgccgtttaaagccttcacacggagcctaggagcgccgtgcagggtgggggctaggtatttatacccccagcacattctgatcgattctagacgcctcccagagcctgatacgcgatcagccatctcggcatagatcatcagcccctatcatggttagctaagcctcaactatgtggacagtgttggatactgtgggggaagaaggacacggtaaaagaaagaggggggagcatcagccttcaagccttaaggtcttagcgcttagcaccgatggtcttagcagttagcaccgagccctctcaagggctcggcatcagcccgaacaggcacagccctgaaaggagtacacgccatcagggaaggcttgagagtacgaggagccctagcgacgagtactcgaaagcctgagggaacaccctcagcactgatggggctagcgtgttcggaaaggacacaagagtgaagtgtgacagctgttcgggagtgaaacccgttctggctaggggtttcagtattaaccaccctcaaaggttacaagactctaagaaaatttaaggaaaagtttaggtttaatttttggacatttactaccaaaaacacccgtttacacccctcaaacccgcctatagagccaaatccaccagtttgactcatcccaggtggtgtatgctaggctggacaggtagccagctggacgcaaggccgaaatccgctgacgcggctttcacccttacatccatcagtctaccaaagacttaaacgcttcaaggctaagcgctaagcccctcagtacttagcaccgagcccttgagggggctcggcatcagtcttaaagctttaaacactttaagtaaacttaagagcttagcacttaaagttaattaataaccttaaaggcttacacacttagcactgagcccttcaaggctcagcatcagtataaagatcttaacacctaagttaagtataaaaccttaaaggcttagcacttaaggatataaacttaacatcagtgtttaagactttaaaacttaaaataactattaagacttaaagacttataagactttaaagaccttaagtacttaaagttaaccatcagtcttaaactttaatattataacctataagtcttaaagcttataggtataataatataatataagttataaaagttttagaagagctaaggggttaacttctttacttctctactctctttggttctttctctcttctcttcttttcttcatcaggggagaagaggaacctttaccgtcaacgctgatgggcttttcaccgtgtgactcgtgtaccaccggtcgcacgctcccggttgcacactctccacactctgacacccgtgtcccttgacggcttggcgtgttcggctcaaggcgtacggcgtgtcacgctaacgcccttaacactaggtaagacttaaagtgtatattatatgtagaagactttaaaaactttagggtgttcctgctgagcctgtgtcctacaccgctaggcgccaagcgctaagccttgaagcgcgaacacccatccacccccatttttctttcgtgcctttcttcttttgacacagctggggggcgatgtgatctttctcacacccatggggggtagtggagaaaacaaccaccccagcacaaacagaacaccccctcaaacgcacaaaacagggcctaggatcgaacagcagggcatcggtagagtattcctacccccaacacgttccaggctgttacaggagcaatgagaggctcacaggggctataggagatcagggggcgtgatggcacacaccaaccgcacagccagccaagctcaccggcgctggcgggcgcgactcatcacccaagcacgcaagcaaggccaaaccgaatgcccactctgcggagccaccatcacctgggacacacacgacctaccaacaagccccgaagccgaccacatcacacccgtcagcaggggaggactcaacaccctagacaacgggcaaatcatctgcagaacatgcaacagaagcaaaggcaacagaacacaaccaaacatcaaactccaacaacaaaccacaaaaacactcgtctcatggtgaaaaaaccgccaacccccaccggggacaccccctgcacaggcgtgcaa

SEQ ID NO: 49 - DNA, 29373 bp, Bacteriophage of P. acnes
cccttttgtggattagtctatttgccgactttttgtgttggtggtgagtgttgtgcagcctgagcttcctgggtctcgtgagtggtgtgatgagacacgtcgctggtggcgtgtgtggggtgaggattcgcgtgcgcagtacgtgtctgatgaggagtggctgtttttgctggatgctgctgtgattcatgatgtggtgtggcgtgagggccgggcggaccttgtggcttcgcttcgtgctcatgtgaaggcttttatgggcatgttggatcggtattcggttgatgtggcgtctggtggccgtggtgggggttctgctgtggcgatgattgaccggtataggaagcgcaagggggcctgattaggtgtctagcgttgtggggtcgcaggttcctcgtcatcgtgtggctgcggcgtattcggtgactgctggcggtgatgctggcgagcttggtagggcgtacgggttgacgcctgatccgtggcagcagcaggtgttggatgattggctggctgtcggtggcaatggcaggcttgcttctggtgtgtgtggggtgtttgtgccgcgccagaatggcaagaatgctattttggagattgtggagttgtttaaggcgactattcagggtcgtcgtattttgcatacggctcacgagttgaagtcggctcgtaaggcgtttatgcggttgcgttcgttttttgagaatgagcggcagtttcctgacttgtatcgtatggtgaagtcgattcgggcgacgaatggtcaggaggctattgtgttgcatcatccggattgtgcgacgtttgagaagaagtgtggctgtccgggttggggttcggttgagtttgtggctcgtagccgtggttctgctcgcggttttacggttgatgatttggtgtgtgatgaggctcaggagttgtcggatgagcagttggaggctttgcttcctacggtgtctgcggcgccttctggtgatcctcagcagatttttttggggactcctcctggcccgttggctgacgggtctgtggtgttgcgtttgcgtggtcaggctttgtcgggtggcaaaaggatcgcatggaccgagttttcgattcctgacgagtcggatccggaggatttggcgcggtcgtggcggaagcttgctggtgacactaatccggcgttggggcgtcgcctgaattttgggacagtctcggatgagcatgagtcgatgtctgctgccggttttgctcgggagcgtcttggctggtgggatcgtggccagtctgctacgtctgtgataccggcggataagtgggctcagtcggcggtggatgaggcgagcctggtcggcggtaaagtgtttggtgtctcgttttctcgttctggggatcgggttgctttggcgggtgccggcaagactgatgctggggttcatgttgaggttattgatgggctgtcgggaacgattgttgatggtgtgggccaactggctgattggctggcgttgcgttggggtggcacggatcggattatggttgccgggtctggcgcggtgttgttgcaaaaagcgttgacggatcgtggtgttccgggccgtggcgtggtggttgctgatactggcgtgtatgtggaggcttgtcaggcgtttcttgagggtgtgcgttcgggtgttgtgtctcatcctcgcgctgattctcgccgtgacatgttggatattgctgtgaggtcggctgtgcagaagcgtaaggggtctgcttggggttggggctcctcgtttaaggatggttctgaggttcctttggaggctgtgtcgctggcgtatcttggtgtgaagatggcgaagtctaagcggcgtgagcgtagtggtaggaagcgggtgtctgtggtatgaactcggatgagttggctcttattgagggcatgtacgatcgtatccaaaggttgtcttcgtggcattgtcgcattgagggctactatgagggttcgaatcgtgtccgtgatttgggggttgctattcctcccgagttgcagcgtgtgcagacggtggtgtcgtggcctggtatagctgtggatgctttggaggagcgtctggattggcttggctggacgaatggtgacggctacggcctggatggtgtgtatgctgcgaatcggctttcgacggcttcgtgtgatgtgcatcttgatgcgctgatttttgggttgtcgtttgtggctgttatccctaacggtgatggttcggtgtcggttcgtccgcagtcaccaaagaattgcaccggaaagttttctgccgatggttctcgtctggatgcgggtttggtggttcagtcgacttgtgatcctgaggtggttgaggcggagcttttgcttcctgatgtgattgttcaggttgagcggcggggctcgcgcgagtgggtcgaggttggccgtatcgagaatgtgcttggtgcggttccgcttgtgcctatcgtcaataggcgtcgcacttcgaggattgatggccggtcagagatcacaaggtctattcgtgcttacacggatgaagcggttcgcacgctgcttgggcagtctgtgaatcgtgatttctatgcttacccgcaaaggtgggtgactggtgtgtcggctgacgagttttcgcagcctggctgggtcctgtcgatggcttctgtgtgggctgtggataaggatgatgacggtgacacgccgaatgtggggtcgtttcctgtcaattctcctacaccgtattcggatcagatgcggctgttggcgcagttgactgcgggtgaggcggctgtcccggagcgctatttcgggtttatcacgtctaacccgccgtcgggkgaggcgcttgcggcggaggagtctcggcttgtgaagcgtgctgagcggcgtcaaacgtcgtttggtcagggctggctgtcggttggttttttggctgcgaaagcgcttgattctagtgttgatgaggccgatttttttggtgatgttggtatgcgttggcgtgatgcgtcgacgcctacccgggcggctacggctgatgctgtgacgaagcttgttggtgccggtattcttccggcggattctcggacggtgttggagatgttggggcttgatgatgtgcaggttgaggctgtgatgcgtcatcgtgccgaatcttcggatccgttggcggcgctggctggggctatatcgcgtcaaactaacgaggtttgataggcgatggcttcgggtgttgcgtcgcggatggctgctgccgggtatcagcgtgaggcggtcaggtttgccgggaagtatgcgggctattatgccgagttgggtcgtttgtggcattccgggaagatgacagatgcgcagtatgtgcgtttgtgtgtggagttggagcgtgccggccatgatggttcagcagctatggcgggcaaattcgtgtccgattttcggaagcttaacggkgtcgatcctggtttgattgtgtatgacgagtttgatgctgccgccgcgttggcgaggtcgttttcgactatgaagatgatgaatagtgacccggatagggcgaatgacacgattgatgctatggcggcgggtgttaatcgggctgtcatgaatgctggccgtgacacggttgagtggtctgcgggtgcgcagggtaggtcgtggcgtcgggtgactgatggtgatccgtgcgcgttttgtgccatgttggctacgaggtcggattatacgaccaaagaaagggcactcacttccggtcatactcggcgtcataagcgtggtggtaagcgtccgtttggttcgaagtatcatgatcattgtggttgtacggtggttgaggttgttggcccttgggaaccgaatagggctgatgccgagtatcagaggacgtatgagaaggctcgtgaatgggttgatgatcatgggttgcagcagtcgcctggcaatattttgaaggctatgcgtactgttggcggcatgcgataatttgatgtggtttccggttgtgcgccgccggttattggtgcacagggttgtctcccgcacgggggtcaacaatgttgtgttgttttccgcaaggagtgtaggttaggctatggccgatcagagtggtgaggaacagaatgttgacaatgatgttgtggagcccggaaagggtggagacattgttgatgttgtgaaggatgggcaggctgccggcgatgatcatgccggtgatgtttccgtgaagggtgaggcttctgggccgtctggcacggattggaaggctgaggcccgtaagtgggagtctcgtgctaaaagtaatttcgccgagttggagaagcttcgcgcctcggatggtgatgcgggatctgtgattgatgatcttcgccgcaagaatgaggaactcgaagaccggatcaatgggtttgttcttgagggtgtgaagcgtgatgtggctgccgagtgtggcctgtcggctgatgctgtagctttcttgtctggtggtgatcgtgaagcgctggtggagtctgctaaggctttgaagggtttgatcgaccatagtagtggtggcgtgggtgtgcgccgtcttgcggggagtgcccccgttgatgatgttaaacgacgtgagggtgtcgcgtttgtggatgctcttgtcaataattctaggagatgatttgtgatggctgacgattttctttctgcagggaagcttgagcttcctggttctatgattggtgcggttcgtgaccgtgctatcgattctggtgttttggcgaagctgtcgccggagcagccgactatttttggccctgtgaagggtgccgtgtttagtggtgttcctcgcgccaagattgttggcgagggcgaggttaagccttccgctagcgttggtgtttcggcgtttactgcgcagcctatcaaggttgtgactcagcagcgtgtctcggatgagtttatgtgggctgatgctgattaccgtttgggtgtgcttcaggatctgatttcgcctgctctgggtgcttctattggtcgcgccgtggatttgattgctttccatggtgttgatcctgctacgggtaagcctgctgcggctgtcaaggtgtcgctggataagacgaagaagacggttgatgccacggattctgccacgaccgatcttgttaaggctgtcggccttatcgctggggccggtttgcaggttcctaacggtgttgctttggatccggcgttctcgtttgccctgtctaccgaggtgtatccgaaggggtctccgcttgccggtcagcctatgtatcctgccgccgggttcgctggtttggataattggcgtggcttgagtgttggtgcttcttcgactgtttcgggtgccccggagatgtcgcctgcctctggtgtgaaggctattgttggtgatttctctcgtgttcattgggggttccagcgtaacttcccgatcgaactgatcgagtatggtgatccggatcagactgggcgcgatttgaagggccataatgaggttatggttcgtgccgaggctgttctgtatgtggctatcgagtcgcttgattcgtttgctgttgtgaaggagaaggctgccccgaagcctaatcctccggccgagaactgatttattgtagcggtgttatgtacatgtgcagggggtggtgttgatgggtataattttgaggcctgaggatattgagcctttcgccgatattcctaaagataagcttgaggcgatgatcgccgatgtggaggctgtggctgtcagtgtcgccccctgtatcgctaaaccggatttcaaatacaaggatgctgccaaggctattctgcgtcgtgctttgttgcgttggaatgatactggcgtgtcggggcaagtgcagtatgagtctgcgggtccgttcgcccagactacacggtctaatactcccacgaacttgttgtggccttctgagattgctgcgttgaagaagctatgtgacgagagtggtggcgccggtaaagcgttcactatcacacccaccattaatagtagatatgcacattctgaggtgtgttctactgtgtggggtgagggctgttcgtgcggatctgatattaacggctgcgatggccctttgtgggagatatgatatgactaattttccttacggggaaacggttgtgatgcttcaaccgactgttcgtatcgatgatcttggcgacagggttgaggattggtctaagcctgtcgaaacagtttatcgtaatgtggctatctatgcttccgtttcgcaggaggatgaggcggctggccgtgattcggattatgagcattggacactgcttttcaagcagcctgttgtgggcgctgattatcgttgcaggtggcgtattcggggtgttgtgtgggaggctgacgggtcgcctattgtgtggcatcacccaatgtctggctgggatgctggtacgcagatctatgtgaagcgtaagaagggctgatgaaatcttggcacaagatgtgaatgtgaagctgaacttgccgggtattcgtgaggtgttgaagtcttctggggtgcagtctatgttggctgagcgtggcgagcgtgtcaagcatgcggctgcggcgaatgtgggcggtaatgcttttgatagggcccaatatcgtagcggattatcatcggaggtgcaggttcaccgtgttgaggctgtggtgaggattggcaccacatataagggtggtaaaaggattgaggcgaagcatggcacgttggctaggtcgattggggctgcatcatgatcgtttacggcgatcctcgcgtgtgggctaaacgtgtgctcaaggatgatggttggctgtctgatgtgccgtgcacgggtactgtgcctgaccggtttgagggtgacttgatttggttggcgttggatggtggccccgagttgcatgttcgtgagcaggtgtttttgcgggtgaatgtgttttcggatactccggatcgtgctatgtcgttggcgcgtcgtgttgaggctgtgctggctgatggtgcggatggtgatccggtggtgttttgtaggcgttctactggtcctgatttgttggttgatggtgcacgttttgatgtgtattcgctgtttgagctggtgtgccgtcctgtcgaatccgagtaaacgtatttgttttctatattttgtttttgtttgattattttgggggttatgatggctgcaacacgtaaagcgtctaatgttcgctcggctgttactggcgacgtctatattggtgacgctcacgccggtgacactattaatggtgttggggagattcctgacggtcttaccgctttagggtatctgtctgatgacgggtttaagattaagcctgagcgtaaaacggatgatttgaaggcttggcagaatgcggatgttgttcgcactgtggctaccgagtcgtctatcgagatttctttccagctgatcgagtctaagaaggaggttatcgaactgttttggcagtcgaaggttactgccggagccgattcgggttcattcgatatttctcctggtgccacgacgggtgttcatgccctgttgatggatattgttgatggggatcaggttattcgctactatttccctgaggcggagcttgttgatcgtgacgagatcaagggcaagaatggcgaggtgtacgggtatggtgtgacgttgaaggcgtatcctgcccagattaaccataagggtgatgcggtgtctggtcgggggtggatgacggctttaaaagctgatactcctccggttccgccgaagcctccgaagcctgagccggatcctaatccgccgtccgataactgatacacgagtttaagggattgttgatagatgagtgacactggtttcacgttgaagattggtgaccgtagttgggtgttggctgatgcggaggagacggcgcaggctgttccggcccgtgtttttcgccgtgccgctaagattgcccagtcgggggagtcggctgatttcgcccaggttgaggtgatgttttctatgttggaggctgccgccccagcggatgctgtggaggctttggaggggcttcctatggttcgtgttgccgagattttccgtcagtggatggaatacaagcctgacggtaaaggtgcctctttgggggaatagtttggctccacggcctgattgatgattatcgtggggccatcgaatatgattggaggacacggttcggttgctcggtttatgatgttggtggccccgtaatgtgttacggtgaggctgtccggctggctggcgtgttgtgtacggacacgtctagccagttggcggcccaccttaatggttggcagcgcccgttcgagtggtgcgagtgggctgtgttggacatgttggatcattacaggtctgctaatagtgaggggcagccggagcctgtggcgaggccgactgatgagcgtcgggccaggtttacgtcgtctcaggtggacgatattttggcgcgtgttcgtgccggtggcggggtgtctcgcgagattaatattatggggtgaatagtgtatgtctggtgagattgcttccgcatatgtgtctttgtatacgaagatgcctggtttgaaatcggatgttggtaaacaattgtccggggttatgcctgctgagggtcagcgttcgggtagtctttttgctaagggtatgaagttggctcttggtggcgcggcgatgatgggcgctattagtgtcgctaagaagggcctcaagtctatctatgatgtgactattggtggcggtatagctcgcgctatggctatcgatgaggctcaggctaagttgactggtttgggtcacacgtcttctgacacgtcttcgattatgaattcggctattgaggctgtgactggtacgtcgtatgcgttgggggatgcggcgtctacggctgccgcgttgtcggcttctggtgtgaagtctggcggtcagatgactgatgtgttgaagactgtcgcggatgtgtcttatatttcgggtaagtcgtttcaggatacgggcgctatttttacgtctgttatggctcgcggtaagttgcagggcgatgacatgttgcagcttactatggctggcgttccggtgttgtctctgttggctcggcagacgggtaaaacttcggctgaggtgtcgcagatggtgtcgaaggggcagattgattttgccacgtttgcggctgcgatgaagcttggcatgggtggtgctgcgcaggcgtctggcaagacgtttgagggcgctatgaagaatgttaagggcgctttgggctatcttggtgctacggctatggccccgtttcttaacggtttgcggcagatttttgttgcgttgaatccggttatcaagtcggtgacggattctgtgaagcctttgtttgcttctgttgatcagggtattcagcgggtgatgccgtctattttggcgtggattaatcgtatgcctgctatgattacgagaatgaatgcacagatgcgcgccaaggttgagcagttgaagggcatttttgcgagaatgcatttgcctgtccccaaggtgaatttgggtgccatgtttgctggcggcaccgcggtgtttggtattgttgccgcgggtgttgggaagcttgtggcagggtttgccccgttggcggttgcgttgaagaatttgttaccatcgttcggtgctttaaggggtgccgctggcggtcttggcggcgtgtttcgtgccctgggtggccctgtcgggattgtgatcggcttgtttgctgccatgtttgctacgaacgcccagttccgtgcagctgttatgcagctggttggtgtggttggtcaggctttggggcagattatggccgctattcagccgctgtttggtttggttgctgggctggtggcccggttggcgccagtgtttgcccagattattggcatggttgccgggcttgcggcacagcttatgcctgtgattagtatgcttgttgccaggctggttcctgtgatcacgcagattattggtgcggtgacacaggttgctgcaatgttgttgccggcgttgatgccggtgttgcaggctgttgtggctgtgattcggcaggttgttggcgtgattatgcagcttgtgcctgttttgatgcctgtgattcaacagatcttgggtgctgttatgtctgttctgccgccgattattggtttgatacggtcgctgataccagtcatcatgtcgattatgcgtgtggtgatgcaggttgttggtgtcgtgctacaagttgttgcccgtattattccggttgtggcgccgattgtgacagctgtgatcgggtttgttgcacgtattcttggtgctattgtgtcggctgccgccaggattattggggctgttgcccgtgttattgggtgggttgtgagccatctggtgtctggtgtggcgcgtatgggttcggctatccaggctggctggaatcatattagggcgtttacgtctgcgtttattaacggtttcaagtcgatcatttcgggtggtgtgaacgcggttgtggggttttttgcccggctgggttcgtcggttgccagccatgtgaggtctgggtttaatgctgccaggggtgctgtttcttccgccatgaacgggatacgtagtgtggtgtcttcggtggcgtctgctgttggcgggtttttcgggtcgatggcgtctagggttcggaatggcgctgtgcgcgggtttaatggggctaggagtgcggcctcttctgctatgcacgctatgggctcggctgtgtctagcggtgtgcataatgtgttgaattttttccgtaatttgcctggtaatattaggcgtgcgcttggtaatatggggtctttgttggtgtctgctggccgtgatgtggtgtctggtttgggtaatggtatccggaatgctttgagtggcttgttggatacggtgcgtaatatgggttctcaggttgctaatgcggcgaagtcggtgttgggtattcattcgccgtcgagggtgtttcgtgacgaggttggtcggcaggttgttgctggtttggctgagggtattactggtaatgctggtttggcgttggatgctatgtctggtgtggctggccggcttccggatgctgtggatgccaggtttggtgtgcgatcgtctgtgggctcgtttacaccgtatggcaggtatcagcgtatgaacgagaagagtgttgtggtgaatgttaacggcccgacgtatggggatcctaacgagtttgcgaagcggattgagcggcagcagcgtgacgcgttgaacgcgttggcttacgtgtgattgggggtgtggatcatgtttattcctgacccgtctgatcgtgccggtttgactgttacctggtctatgttgccgttgattggtaatgatccggagcgtgtgcttcatttgacggattacacgggtgcgtctcctgtcatgttgttgaatgattcgttgcgcggtttgggtgttcctgaggtggagcatttttctcaaactcatgttggggtgcacggctcggagtggcgcgggtttaatgtgaagcctcgcgaggtgacgctgccggtgctggtgtcgggtgttgacccggatccggatggtgggtttcgtgacggttttttgaaggcgtatgacgagttgtggtctgcttttcctcctggcgaggtgggggagttgtctgtgaagactcctgccggtgttgagcgtgtgctaaggtgtcggtttgattcggtggatgacacgtttactgttgatccggttaatcgtggctatgcgcgttatgtgcttcatttgacagcctatgacccgttttggtatggggatgagcaaaagtttcgtttcagtaatgcgaagttgcaggattggttgggtggcggccctgttaataagaagggtaccgcttttccggtggtgttgacgcctggtgttggttcgggttgggataacctgtcgaataagggtgatgtgcctgcgtggcctgtgattcgtgttgagggcccgttggattcgtggtctgtgcagattgatggtttgcgtgtgtcatcagactatcctgtcgaggagtttgattggattactattgacacggatcctcggaagcagtctgcattgttgaacgggtttgaggatgtgatggatcgtttaaaggagtgggagtttgcgccgattcctcctggcggttctcggagtgtgaatattgagatggttggtttgggtgccattgttgtgtcagtgcagtacaggtttttgagggcttggtgaatagtttatggctggtcttgtcccgcagataacattgtttacgccagactatcatcgtgtagcgcctatcaatttttttgagtcgctgaagttgtcgttgaagtggaatggtttgtcgacgctggagttggtggtgtctggtgatcattccaggcttgacgggttgactaagccgggtgcacgcctggttgttgattatggtggtggccagattttttctgggcctgtgcgtaaagtgcacggggttgggccttggcggtcttcgcgggtgactatcacgtgtgaggatgatattcgcctgttgtggcgtatgttgatgtggccggtgaattatcgtcccggtttggttggttcggagtggcgtgcggaccgtgattatgcccactattctggtgcggcggagtcgattgctaagcaggtgttgggggataatgcttggcggtttccacccggtttgtttatgaccgatgatgagcgtcgcggccgctatattaaggattttcaggtgcggtttcacgtgtttgccgataaactgttgccggtgttgtcgtgggctcgtatgactgtttcggtgaaccagtttgaggatgcgaagtttgatcagcgtggtttagtgtttgattgtgtgcctgcggtgacgcgtagtcacgtgttgactgccgagtctggttcgattgtgtcgtgggagtatgtgcgtgacgcccctaaggcgacgtctgtggttgtgggtggccgcggcgagggcagggatcggctgttttgtgaggatgttgattcggctgccgaggaggattggtgggatcgtgtcgaggtgtttaaggatgctcgtaacactgattcggagaaggtgtctctcttcgatgaggctgagcaggtgttgtccgagttgggggccacgtcggggtttaagatcgagttggctgagtcggatgtgttgcgtttcgggcctggcagcctgatgcctggggatttgatttatgtggatgtgggctcggggcctattgcggagattgttcggcagattgatgtggagtgcgattcgcctggtgacgggtggacgaaagtaacaccgattgcgggggattatgaggataatccttcagcgttgctagctcgccgtgtggctggtttggctgctggtgtgcgggatttgcaaaaattctagttgattggggtttgttgtgggtattgtgtgtaaagggtttgatggtgtgttaaccgagtatgattgggctcaaatgtctggtctgatgggtaatatgccgtcggtgaaggggcctgacgattttcgtgtcggcacgacgattcagggtaatacggtgttgtgtgaggtcctaccggggcaggcttgggctcacggggtgatgtgcacgtcgaatagtgttgagacggtgacaggccagttgccgggccctggggagacccgctacgactatgttgtcctgtcgcgggattgggagcagaacacagcgaagttggagattgttcctgggggtcgtgcggagcgtgcccgtgacgtgttgagggccgagcctggcgtgtaccatcagcagttgttggcgactttggtggtgtcgtctaacgggttgcagcagcagttggataggcgtgctatagcggctagggtggcgtttggcgagtctgctgcgtgtgaccctaccccgatggagggtgacagggtgatggttccttctggggcggtgtgggctaatcatgccggcgagtggatgctattgtcccccaggatcgagacgggcactaagcagattcagttttgcgggtctgctgtgtatgcttacacgatcccgtttgaccgccagttcactagtccgccgattgtggtggcgtctatgggaaccgctgctgggggcactgcccagattgatgtgaaagcctacaatattacggtcaagggtttcagtttagcgtttatcacgaatgatggttcgaagccgaatggtgtgcccgcgatagctaactggatagctgtcggcgtgtgaccgtgtcgaggctgtggcggatggtgtgatgttggggggctgtggtgtcgtggtttactcctgcactggtggcctctatttgtaccgcgttggccacgattttgggttctgttcaggcggtcacgtttaaatcgaggaagcgtttgcgtcggctgtcggctcaggtggatgctttggaagagtatgtgtggggtgtgcggcgtaaggttcgccggtttaacgccgggcttcctggcgaggtggagcctatgcatcttcctgatgtgcccgagtttttgaaggatactgttgatggtgggggtgagtagggttgagggagttggaggaagaaaaaaggcagcgccgcaattttgagaaggcttccctaatactgttgttcctgtcgcttgtgctgttgatggtggttgctgcgggtgctttgcgtttcggatcgctgtcttctgagcgggattcggagcaggcgagggcccagtctaatggtaccgctgccaggggtttagccagccgtgtgcggcaggtgtgtgcgcatggtggccaagagtcggtgaagctgcacaggtctggtttgtgtgtggatgctgtgcgcacggagcggagtgtgcagggtgtgcctggcccgaccggtgtacggggcccgcaaggccctgccggtgttgatggccgggatggtgttaatggtttgcctgggctggttggccctgttggtccgcagggttccccgggtttgaatggcgtgaaggggcctgacgggctgcctgggactaatgggtcggatggccatgatggtgtttcgggcagtgcaggtgccgctggtgtaaacggcgctgatggtaaagatggcgcgaatggcaccgatggtgagcgcggtgatgtgggtccttcaggccctgccggcccgcaaggtgcacagggtgaacggggtgagcgcggtgccgctggtgtaaacggcgctgatggtaaagatggcgcgaatggccgttctgtggtgtctgtgtactgttccgggggccgcctgatggtgaaatatagtgacggtgtggcttctaccatatcgggctcggtggcctgccagggtgtggatccgtctcctatagtgaccatatcatcccacaaataatatgaagagggaagggtgttactagtgttggttgtgtttggtggtggtgtgtggtgagatacattcctgcggcgcatcattcggccggctcaaatagtccggtgaatagggttgtgattcatgcgacgtgtccggatgtggggtttccgtctgcctcgcgtaaagggcgggcggtgtctacggcaaattattttgcttccccatcatctgggggttctgcgcattatgtgtgtgatgtgggggagacggtgcagtgcttgtctgagtctacgattggttggcatgccccgccgaatccgcatagtttgggtatagagatttgcgcggatgggggttcgcatgcctcgtttagggtgcccggtcatgcttacacgagggagcagtggctggatcctcgggtgtggcctgcggtggagaaggctgctgtcctgtgccggcagttgtgtgacaaatataatgttccgaaaaggaagcttagtgcagccgatttgaaggctggtaggcggggtgtgtgcggccacactgatgtgacggatgcgtggcatcagtcggatcatgacgatccggggccgtggtttccgtgggacaaatttatggccgtagtctgcggcggtagtggtagtgaggagttaactgtggctgatgtgaaagccttgcatgatcagattaaacaattgtctgctcagcttactggttcggtgaataagctgcaccacgatgttggtgtggttcaggtgcagaatggtgatttgggtaagcgtgttgacgctttgtcgtgggtgaagaatcctgtgacggggaagctgtggcgtactaaggatgctttgtggagtgtctggtattacgtgctggagtgtcgcagccgtcttgccaggcttgaggcggatgtggcccggttgaagaagtgatgtgtgatgggtaaacagttttggttgggcttgtttgagcgtgccctgaaaacttttattcaaacgtttgttgctgtgttgggggttactgcgggtgtcacttatactgcggagtcgtttcgtggtttgccgtgggagtctgccctgattacggccggggtggctgctgtcctgtcggttgctacctcgtttggtaatccgtcgtttgtggccggtaaacctaaaacggcgcctgttgtggatgctgggcttgttccacccgatgatgggggcttggttgagcctcactcggtggatgtgtcggatcctggcatgatcgagccgttggatgatgagagtgtagactatgtgccgaggcgtgccgccgagtctgaggttggcacggtagagtctactgttgcataattgaatatgtgtgtgtgccccagcggtgctgccacgatcgtgtggtggttaccgctggggcactatttctgtatatacggtgtggctatgattcgttgttgttgatggtttcctcaatcgtctgatacaggtggaggcaggtagagatagtttcgttggcctggtctagaatgttctggccgataacatttttatggttgtcgcggtgacaggtgatagaccacaggatctcgtcggccgtcgcttgcaatagtttgacctggtatgcgattccggcgagccagtctagtgcttccgggcttgcctgtgtgtcgtctagcatgccactattgttgctgttgtttgtggggtatcctgcactgtcgcagcaccataggatttcgctgcactcgtctagcgtgtcctgatcgatagcaagatcgtcgaggctgacttctttaacggtaaggttcacgtcatcgagtgagatgggtacacggtacttgttttccaactgttgcatgttggtgggctgttgttggatgattcggtgtactactgttttgagggccgtgtaggggatattgtgtgtggtgttcatggttttatctcatccctgtgatgtcgtcactatcgtctggatagtatctactgtttgcgtagcctgttagggtgatgagtgtttggtcggcccactgtttcacagtctgccgggtgactccgagtcgttgggctgccaccgaataggtttggtcatacccgtatacttcacggaatgctgccaaccgtgccaaatgttttcgctgtttggatggctggcaggagagggtgtagtcgtcgatggctagctgcaggtcgatcatggagacgatgttgttgccgtggtgttgtggcgcggttggtgggggtggcatgcccggctccmcgcgcggtttccatgggccgccgttccagatccattgggcggcttggatgatgtcggcggtggtgtaggttcggttcattggtcatcccctgaataggttgtcgaggttgtctgggttgctggtgtcgaatcgtcccacacagtggcagtagtcgtacatgagtttgataatgtgttggtggtcgccgaggtaggtgtttccgctgatactgtaggtggctgtgccgtctttgctgatgctgtatttggcggtgatggtttcgggtgtttcggtgttggtgatgatggctgtggtggtggtgcctacggtttgtagcactgtggtttgggttccgtcgtcgagggtggttgtgaccattgtggttttccttaaatgcttgtctggttgtcggctatagtggtgatttctggtactggtttgggtagatctaggtgttgtgtagccttgttggctaaacgttgggctacacggtagcacatttggatccacgggttgtcttgtagctggtggtattggttgcgtacggctatgtagaggagtgcgtcttgatagaggtcgtctgggttgatggccggatagcggcgtgcagtgttgctacaagctttgtgtagctggtgttgatggttgggggttgcccattcccagttggctgtggtggcttgctgtactttggttggccgtctgctcatggcactatttcatctcgctatctgatagttgtttggtgttttgttgtttatagtgtagcacactagtccggggtggccggtggtgcctgtgcggtgccgaaaccatgtggattcgccttccatggatgggcattggatgaaggtgcgttgtccttgctcggagatttctagatggtgccggtgcccggccatgagaatactagatacggtgccgttgtggaattcttggccgcgccaccattcgtactgtttgccggtgcgccattggtggccgtgggcgtgcaagatttgtgtgcctgccacatcgacggtggtggtcatttcgtctcggctggggaagtggaagtgaaggttggggtattggttgttgagctggtaggcttctgcgatggcccggcagcagtccacgtcgaaggaatcatcgtaggtggtgacgcctttaccgaagcgcactgcttcgccgtggttgccggggatggatgtgatggtgacgttggcgcagtggtcgaacaggtggacgagttgcatcatggccatgcgggtgagcctgatttgttccgttaagggtgtttgtgtgcgccacgcgttagagccgccttgtgacacgtatccttcgatcatgtcgccgaggaatgcgatgtggacccgttcgggtttgcctgcctgttgccagtagtgttttgcgactatgagggagtgtaggtagtcgtctgcgaatcggctggtttctcctccggggatgcctttgcctatttggaagtcgcctgccccgatgacgaaagcagtgttgttgctgcttgtgttggtttctggtttgggcggctgccagtcggctaatttgttgacgagttcgtcgatcgggtatgggtctgttgcgggttggtggtcgattattttttgtacggatcggcctgtttctccgttggggagtgtccattcggagatgcgtgtgcggcgtacggtgccgtttgtgagatcatcgtcgatggtgtcgatggcgttgttgtggttggctagctgtgtgaggagccggtcaatattgtctatcactggttttcctcctcctgtttctgggtgtttgtgagttggcggcgatagtctttaataacagtggcggagattgggtatccggcttgggtgagctgttttgctagccatgaggcgggaatggttttgtctgcgagcacgtctgcagccttgttgccgtagcgttgaataagggttttagttttggttgccatgatatcctaggggttgtgtggcgggctgccatcctgtgcggcagtcgccgtcgtgtcctggtttacgggtgcaccatgtgatggtgccgtctgtgtggttgagtgtttttccgcacatgacgttttgtagatgctccggcagctggtcggtgttgttgctggtttgtgtgtcgaagagtgttttctggttggtgaaatgctctgacacggtgccattatgtacgggtagtatccatgttttccattgttgttgtagccgggtgttccagtggaattgtttggcggcgttttctgcctgttttaaggttttgtagtagccgactagtatgcgctggtgttcactgtcgggcgggttttggcctcgccagtattgtgccgcgatggcgtaccggttgctggatgtaaaggtgttccagcagtattcaataatgtgttgcaacatactgtctggcaggctgtcggggttgatggtggtgttttgggcaatgatgccgcggatggcttgccggtttttggtggtgggtttgaacgagatgctcacgatagtgccggctggtcgtcttgcatgaactggttgaaggtgttgttaccggcgtgttgggcttgtgtgatgtcctggtcggtccagtcggggtgttgctgtttcagatagtaccagtggcacgcatcgtaggtttcgtcttgtagccgtgtgagatggttttcggtgatgatttgtttccacattgtccatgacacgttgagccgtttgagcatgtctatggctggcacgttgaaggagttgaggaacaggatttcgtgggtgtagtattccttctcgtattggtcccatccacttcggtgcctgttgggctggtttttggggtaggcttcccggcatactttgtgcaaacgcttggccatgtcgtcgggtagtttaatgtcggggttggcgcggatcatggatctcatcccgtcataggtggtgccccaggtgtgcatgatgtaggtggggtcttctccgtcggcccatttttctgcacagatggcgaggcggatgcgcctcctggatgcttggctggtgttgcgccggccggggatggggcacgtgtcgaggggatccatgatgttttagtgtacctttcttgaggtgatgtttgtttactttgtgtggttttattgtagcacagtgtctagtgcttgtgtcaaccctgtttttccggcctgcaggtaggtgtctgtgacatccccgacagtgaggggcacgtgtacggcttgggggagtgccgtctggagggtttgggccatcttgtctcctgctttgtctgggtcggaccagatgtagatgtggtcgtagccttcaaaaaatttggtccaaaagttttgccacgaggttgcgccggggatggctacggccgaccatccgcattgttcgaggatcatggagtcgaattcgccttcgcaaatgtgcatttcggctgccgggttggccatggcggccatgttgtagatggagcctgtgtcccctgccggtgtcaaatatttggggtggttgtgggttttgcagtcgtgcgggagtgagcagcggaaacgcatttttcgtatttcggctgggccgccccagacggggtacatgtatgggatggtgatgcactggttgtagtcttcgtggcctggtatggggtcattgtcgatgtatccaaggtggtggtagcgggctgtttcttcgctgacgcctcttgccgagagaaggtcgagtatgttttcgaggtgggtttcgtagagggccgaggctttctggattcggcggcgttccgcaatgttgtatgggcgtatgctgtcgtacattcgggttttcttcttctaatcgttgttgtagtttggcgaggcctcctccgacaccgcatgtgtggcagtaccagacgcccttgtcgaggttgatgctcatggagggctggtggtcgtcgtggaacgggcagaggatgtgttgctcgttcctggacggattgtaccgtatgtggtaggtgtcgaggaggcggcgggtgtcagaggtgtgggaggagctcgttgagggttgataccacataggcttcgctccatggcttgttgcgctgtttcatcactacgagtccgatggtggactggttttcgcggtttcggtgtgtttcgtagttgcgtgcctcccggctggcttgtttcacgaattcggcgaggtggggttgtcccgctttcgcctcgatcacataggttttatggccggttgtgaggatgaggtcgccttcatcctctttaccgttgaggtggaggcgttctatatcatggccggtgtcgcgtagctggtggaggagtcgtgtttcccattcggctccggcccgccggtttcttgattgttgtgtcgacatgatagtcctttgtgtgttgtggtcatgttccatggctgtttttcggtgaggggcccgaagaatgtgtattcggggtaggctcgtaaccgttcgtatcgggtgccgtcggggctggatttgcctgtgcgctgtttcaacactgcgatgcgcgcctcggccggtatcgtgagcccgttgccattatcctcaccaccatacaatgatactccgaggatgagttgtggtttttctgagaggccgtttttgatttctcgccgtgctggcgggtgttcgatgtcggagccggttttgtctgttgcgtggtgggtgacgatgatggtggagccagtatccctgcccaatgctgtgatccattgcatggcttcttgctgtgcctggtagtcactctcgcagtcttggatgtccatcaggttgtcgataacgatgatgggtgggaaggtgttccacatttccatgtaggcttgcaactccatggtgatgtctgtccatgtgatgggtgactggaaggagaatgtgatgtgttcgccgtggtggatgctgtctcgatagtattctggcccgtagtcgtcgatgttgtgttgtatctgggcggtggtgtgttgggtgttgagtgagatgattcgtgtggaggcctcccagggtgtcatgtcccctgatatgtagagggcgggctggttgagcatggctgtgatgaacattgctagcccggatttttggctgccggaccgccccgcaatcataacgagatcccctttgtggatgtgcatgtccaggttgcggtagaggggttctagctggggtatgcggggcagttcggcagcggtttgggaggctctctcgaaggatcgttgtagagagagcatcggaaccttatctatctatcggttggatgtgtattggtggtcagatggagtcgatatcgatgtcagtagaggctgtggtgtcgtctagctggccgttatcgcgcttgtctacgtattcggcaactttatcatagatggcgtcgtctaatggtttgagcacgaccgcgttgaacccgtttttggtgcgtacggtggcgagtttgaaggcctgctcctcgccaaggtatgcttctagatcgcggatcatggagtgtgggcgatcattgttgcctcgcactttttcgatgatggcgttggggatggtttctggggtgccgttgttgagatcgtctagtgtgtggaagatggtgacatcagcgtagatgcgatcggctgtctgtccaccgtagccttcggtgttgtgttctacgtcgtgcactttgaaggcgatggcggtggcgtcctggtttcgggaggggttgaagaaggtgctgttgctgttgttgcggtagtttgcgagtcccattgttgtttccttttactgttttgttggtttgtgtcggtttttatcgggtgaggctgtttcgtttgctgcggaaagcctcggaaacgtcactgttactggtgatgatcttcttgtactgtttcagaaggtcggctagctgtgccttgcttgttgcattgttgattttgtcgatgacgatactgttttctttggatgcgatgttgtccacgtagtctttggcggcctggttgtatcggtcttggaggatgatggatgcgctcgctactagtgttgcgagatcccagtctttggacacgtcatcgtttttgagtccgcctagcaggtcgatgatggcctgttttgtctgctctgctgtgtctcctcggatgaccgcccatggtgcagcatagtctccaccatatttgagtgtgatcgtgagtcgatcattgtcgatcttgtctttatcggtcatttggtgtccttttctttattgtctgtttctggtggctgtacggtggattctaccgggtatctgtacgagtttttgccgttgacggcccagcatgcgtccttgacggggcagcctttacagagtgttgtgacgtgtgggacgaagatgccttcgctgattcctttcattgcttgactgtacatggatgatacatgccggtaggtgttgttgtcaaggtcgtagagttcggtggatgtgccttgtgtcggggacttgtcgtcgttgcggctggtggctggcgtccaaaacatgccttttgtcacatcgttgccgtgttggttgagcatgtaccggtaggtgtgcagctgcatgctgtcggcgggtaggcgtccggttttgaggtcgaggatgaaggtttcaccggtgtcggtgtcggtgaaaacgcggtcgatgtagccgacaatagtggttccgtcatcgaggatggtttctacagggtattcgatgcctggctggccgtcaataacagcggtagcgtattctgggtggttgcgcctccatgttttccaccggtcaacaaaggtttgaccgtaaaccatccaccagtcgtagtctttcttgtgtggcccgcccgactcgcacaggtttttgcacactctgccggagggtttgatttctgtgccttcggattcggcgagggcgacttgggtgtcgaaaatgtttttaaaggatgcgagtttgtctggcagtgcagggtattcggcggggttgtacaggtggaggtcgtattgttcggtgatgtggtgtatggcgcttccggcgatggtggcgtaccaggtgtggtgttgggcgtggtagccgtgggataggcgccatttttctccacactcggcccactgggtgagtgaactgtaggagatgtggcctggatggtggatggttttcgggtattgtgctagaggcattacttgtcgcctttgtgggtgttccaggggtttcgggtgtcttggccggcatcgtgttgctggtatgcgaggagtgcgaggcagtgccaggcagcatgggctagatgcggtagcccggattcgcggtcgaggttgttgccttgctgccatgatagcacatggcggtagagggcgtcaacgctgtggctccacgggtatcctccggtccagttgttgtcgccgtatttggtggcaccgtatccggcaacctcgcctagggcgtgcaaggctgtagggtcgatgagggagagcctgcaaagtttcaattcttttcgggcaccggtgttggggtcggtgtacatgcgggtgggctcatccatggtgcgtgtgctccttaagcgtgggttactggttgttgtcgtgggctagggcgacggcgagaataatgatggcgagggtttcagctatcaggatgggtgttgtgatcatttgtggtttttgggatggtaggtgagggttgatgcacctaggagggtggcgagggcgcatgcggcgatgatggcgagggctgccttgtgtggggtgccggttgcgtacatccatgtgatgatggcgccttggatccaggcgagactggtgaagaacgtttcgtaactgtgtagctcaatgttgttgttgggtgtgttcatgcttgctcctgaagaatggtgttgatggttttataaatgttgtacaggtcggtttcgatagataacagttggttgatttggtggtcgagatcaatgtctgggttgagttggttgatgcgggatgcaatatcggtggctgtgcgtagtgtgccgccggtgtggtgaataatgtgcgccgtgtcggcgagtccggtggtgacagcgtagtgggagaggagaggcatagcggggatgctccttggcgggttactgttgcgggttgatgttgaggtcggtgacgtgcgggtggtcttctgttccggtgacgaggcagtggacggtgacgggtagtttggatgctcccggctgtttcattgttgcgccgtagacgatgctgaaggtgtctttgccaataattttgtggagttggaggtcgatgtcggggttgccgttccatttaacgccttgtgctgctgctttctgttcggctttccggtcgcaggtgtgggctgcggtgatcatggtgagtccggtggaggtttcttcaccccttgcctgggcttgcttgtgggttttagtctgttcggcttgtagggagcggactgcggcggcctggcgggccttcttctcggctttgcgctgttggacggttttgggtgtccattcggtgttggctgtggtggcctgtggggctggctgtgaggcgagtggcggattatcgtcgggtgctgggaggaaagagcatgcggcgatgatggcggctgtgattccggcgatggtgtagccgtttttcttgttcatgactgttgtcccctttccggggtgttgttcgttgctgacatgatcaatacttccagtgactggacctcatgtcaaggctgcgctcaactattgtgagcgtttcttgtgtggcttggggttttatcgggcgcatagggtgagtaggtggccaacattgatgcgtgtcacgttccagtagagttgtgtggcttcaccgccggtgagcggcttccactcatcatggctgaacacggtgccgtcggtggctatgaatgtgttggggcgtagcttgtggagttcagtctctacgctctgccggtaggcttcggcgaggccctcaaaatccatgtggtcgcaggagaggttttcgaggcgtgtcaggtcgaagggtgtggggcagtcgtagctggcgggggtgtagagctgggtgaagtgatcggcgatcttttgcatcatgattccttttctagtgtggtgggttgatagttttatcgggtggatgcgacaaggatggcgtctacgtcgatcatgtcgatgagatcgtgaagttcctcggcctcattctcggtgagtggctgccagtctcgtggcccgtatatggctccgtcgagggtgacagtccacaggggccggatgagccggatggcttcttcgactttggcacggtataggcggcagatgatagacgtgtgggtgttgcctatgtcacatcctgccaggtgtgcggggtggagtgggttgatttctgtctgcccgtagaggctggtgaatgatggtgtgatgagtgtgccatccatgggagtgctcctttcggtggtgtaggggttgttgtggtttctagagtgtgcgggctgcgaccctacagtcaaggctgcgctcattcggattgagtgtttcatgctggagtgtcgggcgtgaccagatgtcactgaagcctttatggcctctctcagcgtctcaaatcttctaggggtaggattatgcagggttgaccctgctgatcgattctaggggcctttacgtgcgtctcaggggtatgtctgggtgatagcaggtgtggcagatggcccggaaggtcgagataggtctgcatcgcaacgtttggggtgtcatatctgaatattggatctacaccctcatgctgtgtgagataggtcacactcgcctagcgtggtgtgcactctcgaggccactctgccgatctaacgtagagggtgtagcccagaaatgccatttaaagccttcacatggcgcctaggagcgccttatagggtgggggctaggtatttatacccccagcatattctgatcgattctagacgcttccaggagcctgatgcacgatcaaccatctcggcatagatcatcagcccctatcccgcttagctaagcctcaactatgtggacagtgttggatgctgtgggggaagaaggacacagtagaagaaagaagggggagcatcagtcttaacacctgaggtacttaagttaaccttaggatcttagcactgatgggcttaacgcttagcaccgagcccttgaggggctcggcatcagcccgagcaggcacagtcctgaaaggggtacacgccatcagggaaggcttgagagtacgaggagcctcagcgacgagtactcgaaagcctgagggaacacccttagcactgacaggcctagcgtgttcggaaaggacacaggggtacagtgtgacagctgtccgggagtgaaacccgttctggctaggggtttcagccttaaccacctgtaaaggttacaagactctaagaaaatttaaggaaacttttaggttttatttttggacctttaccaccaaaaacacccgtttacacccctcaaacccgcctatagagccaaacaccggtgttgagggtatctctacctagtgtgataggctggacaggtagccagctggacgcaaggccgaaatccgctgacgcggctttcaccctcacatccatcagtctaccaaacactttaaagcttcaaggctaagcgctaagcccttaagaccttaacgcttagcaccgagcccctcaagggctcggcatcagtcctaagagctaagcccttaaggatctaagttattataaaagctttaaagtcttaaagtaaatatataaccttaacagttaaacgtttaaagctttaaaccttaacacctaagttaattataaaaccttaaaggcttagcacttaaggatataaacttaacatcagtgtttaagacttaaagacttataagctttaaacacttaaagtaactctaagactttaaaaaccttaagtacttaaagttaaccatcagtcttaaactttaatattataacctataagtcttaaagcttataaattataaaagttttagaagagctaagagattaacttctttacttctcttctctctttggttctttctctcttctcttcttttcttcatcaggggagaagaggaaccttttaccgtcaacgccgatgggctttcaccgtgtgactcgtgtgcttctggtcgcaagctcccatcgcacactccccacacggtgacacctgtgtccctttcaagcttagcgtgttcggctgaaggtgtacggcgtgtcacgctaacacccttaacaccaggtaagacttaaagtgtatattatatgtagaagactttaaaacctataaggtgttcctgcttagcctgtgtccttcaacgctaggcgccaaacgctaagccttgaaacgcgaacacacacccacccccatttttctttcgtgtccttcttcttttgacacagccgggggggtagtggagaaaacaaacaccccaccacgttcaagacaccccctcaaacgcacaaaacagcccctagaatcgaacggcagggcaagggcaaggtattcatacccccagacgattccaggccgttacaggggccataggtgaataggggacgtaatggcacacaccaaccgcaccgcatctgcctcacaccggcgctggcggcaacgactcatcacccaagcccggcagcaaggccaaaccgaatgcccactctgcggagtcatcatcacctggaacacacacgacctgccaacaagccccgaagccgaccacatcacacccgttagcaggggaggactcaacaccctcgacaacgggcaaatcatctgcagaacatgcaacagaagcaaaggcaacagaacacaaccaaacattcaattccaacaacaaaccacaaaaacattgattccatggtgacaaacccgccaacccccaccggggacaccccctgcacacc

SEQ ID NO: 50 - DNA, 29424 bp, Bacteriophage of P. acnes
gcttagtgaaatacctcccttttgtggattagtctatttgtcgacattttgtgttggtggtgagtgtggtgcagcctgagcttcctgatagtcgtgattggtgtggggagacgcgtcgttggtggcgtgtgtggggtgaggatagtcgcgcgcagtacgtgtctgatgaggagtggctgtttctcatggatgctgcggtgattcatgatgtggtgtggcgtgggggtcgtgctgatttggtggcttcgcttcgtgctcatgtgaaggcgtttatgggcatgttggataggtattcggttgatgtggcgtctggtggtcgcggtaatggttctgctgtggcgatgattgacaggtacaggaagcgtaaaggggcctaatgtctagcgttgttggttctcaggttccgcgtcatcgtgttgctgcggcgtattcggtgactgctggcggggatgctggggagcttgggcgtgcgtatgggttgacgcctgatccgtggcagcagcaggtgttggatgattggcttgcggtcggcggtaatggtcgtcttgcttctggtgtgtgtggggtgtttgttccgcggcagaatggcaagaatgcgatccttgaggttgtggagttgtttaaggcgactattcagggtcgccgtattttgcatacggctcacgagttgaagtcggctcgtaaggcgtttatgcggttgcgttcgttttttgagaatgagcggcagtttcctgacttgtatcgtatggtgaagtcgatcagggcgacgaatggccaggaggctattgtgttgcatcatccggattgtgccacgtttgagcgtaagtgtggttgtccgggttggggttctgtcgagtttgtggctcgtagccggggttcggctcgcgggtttactgttgatgatttggtgtgtgatgaggctcaggagttgtcggatgagcagttggaggctttgcttcctacagtaagcgctgctccgtcgggtgatccgcagcagatttttttgggtactccgccggggccgttggcggacgggtctgtggtgttgcgtcttcgtgggcaggctttgtcgggtggtaaaaggtttgcgtggacggagttttcgattccggatgagtctgatccggatgatgtgtcgcggcagtggcggaagttggcgggggagactaatccggcgttgggtcgccgcctgaattttgggacagtatcggatgagcatgagtctatgtctgcggccggttttgcgcgggagcggcttggctggtgggatcgtggccagtctgctacgtctgtgattccggccgataagtgggctcagtctgctgtggatgaggcgagtctggtgggcgggaaagtgtttggtgtttcgttttctcgttctggggatcgggttgctttagcgggtgccggccggactgatgctggggttcatgttgaggttattgatggactgtcgggaacgattgttgatggtgtgggccggttggctgactggttggcggttcgttggggtgacactgaccggatcatggttgccgggtctggtgcggtgttgttgcagaaagcgttgacggatcgtggtattccgggccgtggcgtggtggttgcggatactggcacctatgtggagtcttgtcaggcgtttttggagggtgtcaggtctggtgttgtgtctcaccctagggctgattctcgccgtgacatgttggatattgctgtgaggtcggctgtgcagaagcgtaaagggtctgcgtggggttggggttcctcgtttaaggatggttctgaggttcctttggaggctgtgtctttggcgtttatgggggctaaacaggctaggcgtggccgtcgtgatcgtagtggtaggaagcgggtgtctgtggtatgaactcggatgagttggctctgattgagggcatgtacgatcgtatccaaaggttgtcttcgtggcattgccgtattgagggctactatgagggttcgagccgggtgcgtgatttgggggttgctattcctccggagttgcagcgtgtgcaaacggtggtgtcgtggcctggtatagctgtggatgctttggaggagcgtctggattggcttggctggacgaatggtgacggctacggcctggatggtgtgtatgctgcgaatcggcttgctacggcgtcgtgtgatgtgcatttggatgcgctgatttttgggttgtcgtttgtggctgttatcccccaggatgatgggtcggtgttggttcgtccgcagtcaccaaagaattgcacaggcaagttttctgccgatggttctcgtctggatgcgggtttggttgtgcagcagacgtgtgatcctgaggttgttgaggcggrgttgttgctgcctgatgtgattgttcaggtggagcggcgcgggtctcgtgaatgggttgagacgggccgtatcgagaatgtgcttggggcggttccgcttgtgcctattgtgaatcggcgcaggacgtctcgtattgatgggcgttcggagattacgaggtctattagggcttacactgatgaggctgttcgcacactgttggggcagtctgtgaatcgtgatttctatgcgtatcctcagcgttgggtgactggcgtgagcgcggatgagttttcgcagcctggctgggtcctgtcgatggcttctgtgtgggctgtggataaggatgatgatggtgatactccgaatgtggggtcgtttcctgtcaattcgcctacaccgtattcggatcagatgagactgttggcgcagttgacggctggggaggctgctgttccggagcgttattttgggtttatcacgtctaatccgccgtcgggtgaggcgcttgcggcggaggaatctcggcttgtgaagcgtgctgagcggcgtcaaacgtcgtttggtcagggctggctgtcggttggtttcctggctgccagggcgcttgattcgrgtgttgatgaggccgatttttttggtgatgtgggtttgcgttggcgtgatgcttcaaccccgactcgggcggctacggctgatgctgtgacgaagcttgtgggtgtcggtattttgccggcggattctcggacggtgttggagatgttggggcttgatgatgtgcaggttgaggctgtgatgcggcatcgtgccgaatctgcggatccgttggcggcgctggctggggctatatcgcgtcaaactaacgaggtatgataggcgatggcttcgggtgttgcgtcgaggttggctgctaccgggtatcagcgtgaggcggtcaggtttgccgggaagtatgcgggctattatgccgagttgggtcgtttgtggcattccgggaagatgagtgacacacagtatgtgcgtttgtgtgtcgagttggagcgtgccggccatgacggttccgcggctatggcgggcaaattygtttcagattttcggaagcttaacggtgtgggtcctggtttgatcgtgtatgacgagtttgatgctgctgcggctttggcgaggtcgttttcgactatgaagattatgaatagtgacccggatagggcgaatgatactattgatgctatggcggcgggtgttaatcgggctgtcatgaatgctggccgtgacacggttgagtggtctgcgggtgcgcagggtaggtcgtggcgtcgggtgactgatggtgatccgtgtgctttttgtgccatgttggctacgaggtcggattatacgactaaggaaagggcgctcacgactggtcatactcggcgtcataagcgtggcggtaagcgtccgctgggttcgaagtatcatgatcattgtgggtgtacggtggttgaggttgttggtccttgggaaccaaatagggctgataccgagtatcagaaggtttatgagaaggctcgcgagtgggttgatgatcacgggttgcagcagtcgcctggcaatattttgaaggctatgcgtactgttggcggcatgagataatttgatgtggtttccggttgtgtatcgccggttatcggtgcacagggttgtctcccgcacgggggtcaacaatgttgtgttgttttccgcaaggagtgtagggttaggctatggccgatcagagtgttgaggaacagaatgttgacaatgatgttgtggagtccggaaaggataacggcattgttgatacagtaaaagacgatggcgggcaggaggtagccgacaatcagttgaagaatgaaggcgagggtaaatcgccggggactgattggaaggcggaggcccgtaagtgggagtctcgtgcgaaaagtaattttgccgagttggagaagcttcgtacatcgagtgacgattctggatctactattgatgagcttcgccgcaagaatgaggaactcgaagacaggatcaacgggtttgttcttgagggtgtgaagcgcgaggtggcttcagagtatggtttgtccagtgatgcgatcgctttcttgtcgggtggcgataaggagtcgcttgccgagtctgcgaaagctttgaagggtttgatcgaccagagtggtggtggcgcgggtgtgcgccgtcttgcggggagtgcccccgttgatgatgttaaacgacgtgagggtgtcgcgtttgtggatgctcttgtcaataattctaggagatgatttgtgatggctgacgattttctttctgcagggaagcttgagcttcctggttctatgattggtgcggttcgtgaccgtgctatcgattctggtgttttggctaagctgtcgccggagcagccgactattttcggccctgtgaagggtgccgttttcagtggtgttcctcgcgctaagattgttggtgagggcgaggttaagccttcggcttcggtggatgtttcggcgtttactgcccagccgatcaaggttgtgactcagcagcgtgtctcggacgagtttatgtgggctgacgctgattaccgtctgggtgtgcttcaggatcttatttctcccgctctgggtgcctcgattggtcgtgccgtggatcttattgctttccacggtattgatcctgctacgggtaagcctgctgcggctgtcaaggtgtcgctggataagacgaagaatgttgttgatgcaaccgatagcgctacggctgatcttattaaggctgtcggcctgattgcgggtgctggtttgcaggttcctaacggggttgctttggatccggcgttctcgtttgccctgtctactgaggtgtatccgaaggggtctccgcttgccggccagcctatgtatcctgccgccggttttgctggtttggataattggcgcgggctgaatgttggttcttcttcgactgtttcgggtgccccggagatgtcgcctgcctctggtgttaaggctattgttggtgatttctctcgtgttcattgggggttccagcgtaacttcccgatcgagctgatcgagtatggcgatccggatcagactgggcgtgacctgaagggccataatgaggttatggttcgtgccgaggctgtcttgtatgtggctatcgagtcgcttgattcgtttgctgttgtgaaggagaaggctgccccgaagcctaatccgccggccgagaactgatttatcgtagcggtgatgtgtcaatgtgcagggggtggtgttgatgggtatcattttgaagcctgaggatattgagcctttcgccgatattcctagagaaaagcttgaggcgatgatcgccgatgtggaggctgtggctgttagtgtcgccccctgtatcgctaaaccggatttcaaatacaaggatgctgccaaggctattctgcgtcgtgctttgttgcgctggaatgataccggggtttcggggcaggtgcagtatgagtctgcgggtcctttcgcccagactacacggtctaatactcccacgaatttgttgtggccttctgagattgctgcgttgaagaagttgtgcgacgagagtggtggggctggtaaagcgttcactattacaccgaccatgaggagtagtgtgaatcattctgaggtgtgttccacggtgtggggtgagggctgttcgtgcgggtcgaatattaacggctgcgatggccctttgtgggagatatgatatgaccagttttccttatggtgaaacggttgtgatgcttcaaccgactgttcgtgtcgatgatcttggtgacagggttgaggattggggtcatcctgtagaaaccgtgtaccataatgtggccatctattcttctgtgtcacaggaggatgaggcggcaggccgtgactcggattatgagcattggtcgatgctgttcaagcagcctgttgtgggcgctgattatcgttgccggtggcgtattcggggtgttgtgtgggaggctgacgggtctcctatggtatggcatcatccgatgtctggctgggatgctggtacgcaggttaatgtgaagcgtaagaagggctgatagattgtggctcaggatgtgaatgtgaagctgaacttgccgggtattcgtgaggtgttgaagtctcctggggtgcaggctatgttggctgagcgtggcgagcgtgtcaagcgtgccgcttcggcgaatgtgggcggtaacgctttcgataaggcccagtatcgtggcggattgtcgtcggaggttcaggttcaccgtgttgaggctgtggcgaggattggcaccacctataagggtggtaagcgtattgaggcgaagcatggcacgttggctaggtcgattggggctgcgtcgtgatcgtttacggtgatcctcgtgtgtgggctaaacgcgtgctcaaggatgatggctggctgtcggatataccgtgcacgggtactgtgccggatcaatttgagggtgacctgatttggcttgcgttggatggtggtccacagttgcatgttcgtgagcgtgtttttcttcgcgtgaatgtgttttcggatataccggatcgtgctatgtcgttggcgcgtcgtgttgaggctgtgctggttgatggtgtggatggtgatccggtggtgttttgtaggcgttctacgggtcctgatttgttggttgatggtgcacgttttgatgtgtattcgctgtttgagctggtgtgccgtcctgtcgaatccgagtaaacgtatttgttttctatattttgtttttgtttgattatttttgggggttgtgatggctgcaacacgtaaagcgtctaatgttcgctctgctgttacgggtgacgtctatattggtgccgctcacgccggtgacactattgatggtgtgaagacggttcctgacggtcttaccgctttagggtacctgtcggatgacgggtttaagattaagcctgagcgtaaaacggatgatttgaaggcttggcagaatgcggatgttgttcgcactgttgccaccgagtcgtctatcgagatttctttccagctgatcgagtctaagaaagaggtcatcgagctgttttggcagtcgaaggttactgccggatccgattctggttcgttcgatatttctcctggcgccacaacgggtgtgcatgctctgttgatggatattgttgatggcgatcaggttattcgctactatttccctgaggttgagcttatcgatcgtgacgagattaaggggaagaatggcgaggtttacgggtatggtgtgacgttgaaggcgtatcctgcccagattaataagaagggtgatgcggtgtctggtcgggggtggatgacggctttaaaagctgatactcctccggttcctccgaagcctcagccggatccgaatccgccgtccgataactgatacacattataagggattgttgatagatgagtgacacaggttacacgttaaagattggtgaccgtagctgggtgttggctgatgctgaggagacggcgcaggctgttcctgcccgtgtgtttcgccgtgcggctaagattgcccagtcgggggagtctgcggatttcgcccaggttgaggtgatgttttctatgttggaggctgccgccccggctgacgctgtggaggctttggaggggcttcctatggttcgtgtggcggaggttttccgtgagtggatggaatacaagcctgacggtaagggtgcctcgctgggggaatagtttggctccacggcctgattgatgattatcgtggggccatcgaatacgattttcgcactaagtttggtgtttctgtttatagtgttggtggcccggtgatgtgttggggtgaggctgtccggctggctggcgtgttgtgtaccgatacgtctagccagttggcggcccacctgaatggttggcagcgcccgtttgagtggtgtgagtgggctgtgctggacatgttggatcattacaggtctgctaatagtgaggggcagccggagcctgtggcgaggcctacggatgagcgtagggcccggtttacgtctgggcaggtggacgatattttggcgcgtgttcgtgccggtggcggggtgtctcgcgagattaatattatggggtgaatagtgtatgtctggtgagattgcttccgcatatgtgtcgttgtatacgaagatgcccggtttgaaggctgatgttggtaaacagctttctggggtgatgcctgctgagggtcagcgttcgggtagcttgtttgctaagggcatgaagttggctttgggtggcgccgcaatggtgggtgccatcaatgttgctaagaagggcctcaagtctatctatgatgtgactattggtggcggtattgctcgcgctatggctattgatgaggctcaggctaagttgactggtttgggtcacacgtcgtctgacacgtcttcgattatgaattcggctattgaggctgttactggtacgtcgtatgcgttgggtgatgcggcttctactgcggcggcgttgtctgcttcgggtgtgaagtctggcgggcagatgacggatgtgttgaagactgtcgcggatgtgtcttatatttcgggtaagtcgtttcaggatacgggcgctatttttacgtctgttatggctcgcggtaagttgcagggcgatgacatgttgcagcttacgatggcgggtgttcctgtgttgtctttgcttgccaggcagacgggtaaaacgtcggctgaggtgtcgcagatggtgtcgaaggggcagattgattttaacacgtttgcggctgcgatgaagcttggcatgggtggtgctgcgcaggcgtctggtaagacgtttgagggcgctatgaagaatgttaagggtgccctgggttatcttggtgctacggctatggcgccgtttcttaacgggttgcggcagatttttgttgcgttgaatccggtgatcaagtcggtgacggattctgtgaagccgatgtttgctgccgtcgatgctggtattcagcgtatgatgccgtctattttggcgtggattaaccgtatgccgggcatgatcacgagaatgaatgcacagatgcgcgccaaggtggagcagttgaagggcatttttgcgagaatgcatttgcctgtccctaaagtgaatttgggtgccatgtttgcgggtggcacagcggtgtttggtattgttgctgccggtgtggggaagcttgtcgcggggtttgccccgttggcggtgtcgttgaagaatttgttgccgtcgtttggtgctttgaagggtgccgctggcgggcttggcggcgtgtttcgcgccctgggtggccctgtcggtattgtgatcggcttgtttgcggcaatgtttgccactaacgcccagttccgtgccgctgttatgcagcttgtgggggttgttggccaagctctgggccagattatggccgctattcagccactgtttggtttggttgccgggctggtggcacagttggcgcccgtgttcggccagattatcggtttggtggctggtttggcggctcagcttgtgcctgtgattggtatgctggtggcacggctggttcctgtgatcacgcagattattggtgcggtgacacaggttgctgcaatgttgctgcctgcgttgatgccggtgttgcaggctgttgtggctgtgatacggcaggttgttggcgtgatcatgcagttggtgcctgttttgatgcctgtgattcagcagattttgggtgctgtcatgtctgtgctgccacccattattggcctgatccggtcgctgataccggtgatcatgtcgattatgcgtgtggtggttcaggttgtgtcggcggtgttgcaggtggtggcccgtattattccggttgttatgccgatttatgtttcggtgattggattcattgccaagatttatgctgcggttatcgtttttgaggctaaggttattggcgctattcttcgtactattacgtggattgtgaatcattcagtgtctggcgtgaggtctatgggcacggccatccagaatggctggaatcatatcaaatcgtttacgtcggcgtttattaacggtttcaagtcgatcatttctgccggtgttgccgcggttgtggggttttttacgcggcttggtttgtcggttgcctcccatgtgaggtctggttttaacgcggcccgtggcgctgtttcttctgcgatgaatgctatccggrgtgttgtgtcttcggtggcgtctgctgttggcgggtttttcgggtcgatggcgtctagggttcggaatggtgctgtgcgcgggtttaatggtgcccggaatgcggcttcttctgctatgcacgctatgggctcggctgtgtctagtggtgtgcatggtgtgctgggttttttccggaatttgcctggcaatattcggcgtgcgcttggtaatatggggtctctgttggtgtctgctggccgcgatgtggtgtctggtttgggtaatggtatccggaatgctatgagtggcctgttggatacggtgcgtaatatgggttctcaggttgcgaatgcggcgaagtcggtgttgggtattcattccccgtcgagggtgtttcgtgaccaggttggccggcaggttgttgccggtttggctgagggtattactggtaatgctggtttggcgttggatgcgatgtcaggtgtggctggtcggctgcctgatgcggttgatgcccggtttggtgtgcgatcgtctgtgggctcgtttaccccgtatggcaggtatcagcgtatgagcgagaagagtgttgtggtgaatgtgaatgggcctacgtatggggatccgaacgagtttgcgaagcggattgagcggcagcagcgtgacgctttgaacgcgttggcttacgtgtgattgggagtgttgtgcatgtttcttcctgacccgtctgatcgttctggtttgactgtgacatggtttatggatccgctgtttggcgacgagcgtgtgcttcatttgacggattatacgggtgcgtctcctgtcatgttgttgaatgattcgttgcgcggcctgggtgttcccgaggtggagcatttttctcaaactcatgttggggtgcacggttcggagtggcgcgggtttaatgtgaagcctcgcgaggtgacgctgccggtgttggtgtcgggtgttgacccggatccggtgggcgggtttcgtgacggttttttgaaagcctatgacgcgttgtggtctgcttttcctcccggggaggagggcgaactgtcggtgaagactcctgccggtgttgagcgtgtgctaaaatgccggtttgattcggtggatgacacgtttacggttgatccggtgaatcgtggctacgcccgctatgtgattcatttgacagcctatgacccgttttggtatggggatgagcaaaagtttcgtttcagtaacgcgaagttgcaggattggttgggtggcggcccggtcggcaaggatggtacagcgtttcctgtggtgttgacgcctggtgttggttctggctgggataacctgtctaataagggtgatgtgcctgcgtggcctgtgattcgtgttgaggggcctttggagtcgtggtctgtgcagattgatggtttgcgtgtgtcatcagactatccggttgaggagtatgattggattactattgatacggatcctcgcaaacagtctgcattgttgaacgggtttgaggatgtgatggatcgtttgaaggagtgggagtttgcgcctatcccgcctggcggttctcggagtgtgaatattgagatggttggtttgggtgccattgttgtgtcggtgcagtacaggtttttgagggcttggtgaacgattcatggctggttttgtcccgcagataacattgtttacgccagactatcatcgggtggcgcctatcaatttttttgagtcgctaaagttgtcgttgaagtggaatggtttgtcgacgctggagttggtggtgtcgggtgatcattccaggcttgacgggttgacgaggccgggtgcacggctggttgttgattatggtggtggccagattttttctgggcctgtgcgtagggtgcacggtgttggtccttggcgttcttcgcgtgtgactatcacgtgtgaggatgatattcggctgttgtggcgtatgctgatgtggcctgtgaattatcgtcctggtttggttggtatggagtggcgtgccgacagggattatgcccactattctggtgctgcggagtcggtggctaagcaggtgttgggggataatgcttggcgttttccgcccgatttgtttatgaacgatgatgagcgtcgtggacgctatattaaggattttcaggcccggttccacgtgtttgccgataaactgttgccggtgttgtcgtgggctcgtatgactgtcacggtgaaccagtttgagaatgcgaagtttgatcagcggggtttggtgtttgattgtgtgcccgcggtgacccgtagtcatgtgttgactgccgagtctgggtctattgtgtcgtgggagtatgtgagggatgctcctaaggcgacttcggtggttgtgggtggccgcggcgagggcaaggataggctgttttgtgaggatgttgattcgatggccgagggggactggtttgatcgtgtagaggtgtttaaggatgcccgtaacacggattcagagcatgtgcatcttattgatgaggctgagcaggtgttgtccgagttgggggccacgtcggggtttaagatcgagttggctgagtcggatgtgttgcggtttgggcccggcaatctgatgcccggggatttgatctatgtggatgtgggctcggggcctattgcggagattgttcggcagattgatgtggagtgtgattcgcctggtgacgggtggacgaaggtgacaccggttgcgggggattatgaggataatccttcggctttgctggcgcggcgtgttgctggtttggctgctggtgtgcgggatttgcaaaaattctagaaaagattaggggtttgttgtgggtattgtgtgcaagggttttgatggtgtgttgaccgagtatgattgggctcaaatgtctggtctgatgggtaatatgccgtcggtgaaggggcctgacgattttcgtgtcggtactacggttcagggtgccacagtgttgtgtgaggttttgcctgggcaggcttgggctcacggggtgatgtgtacttcgaatagtgtggagacggtgacagggcagcttccgggtcctggtgagacccgctacgactatgtggtgttgtcgcgggattgggagcagaatacagccaagttggagattgttcagggtggtcgtgcggagcgtgcccgtgacgtgttgagggccgagcctggcgtgtaccatcagcagctactggctactttggtggtgtcgtctaacgggttgcagcagcagctggataggcgtgctatagcggctagggttgcgtttggcgagtctccggcttgtgacccgaccccagtagagggtgaccgggtgatggtcccctctggggctgtgtgggctaaccatgctggcgaatggctgcagttgtctccgcgtatcgagacgggcactaagcagatccagtttggcgggtctgccgtgtatgcttacacgatcccgtttgagcggccgtttagtagtgcacctgttgtggtggcgtctatggctacggcggctgggggcacggcacagattgatgtgaaagcctacaatattactacaagtaaatttgatttggcgtttattacgaatgatggttcgaagccttctggtgtgcccgcggttgcgaattggatagctgtgggcgtgtgattatacaggtgttgtggtggctggtgtgatgttggggggctgtggtgtcgtggtttactcctgcactggtggcctctatttgtaccgcgttggccacggttttgggttctgttcaggctgtcacgtctaaatcgaggaagcgtttgcgtcggctgtcggcccaggtggatgctttggaagagtatatgtggggtgtgcggcatgaggttcgccggtttaacgccgggcttcctgacgaggtggagcctatgcatcttcctgatttgcctgagtttttgaaagatactgttgatggtggaggtgagcagggttgagggagttggaggaggagaagcggcagcgccgcaattttgagaaggcttcactgttgttgctgtttttgtcgcttgtactactagcggtggttgctgcgggtgctttgcgtttcggggctgtatcctctgagcgggattcggagcaggcgagggcccagtcgaatggtacggctgccaggggtttagccagccgtgtgaagcgggtgtgtgcttcgggcggggtggagtctgcgcggcttcaccgttctggtttgtgtgtggatgctgtgcgcacggagcggagtgtgcagggtgtgcctggcccagccggtgagcgcggcccgcaaggcccggctggtgtggacggccgggatggtgttaatggttcggccgggctggttggccctgttggtccgcagggttctcctggcttgaatggtgtgaaaggtcctgacgggttgcccggtgctagcggcaaggatggtgccgctggtgttgcgggccgtgcaggtgctgatggtgtgaacggcgttgatggtcgggatggttcggccggtgagcgcggcgatgtgggtccttcaggtcctgccggcccccaaggtgtacagggtgagcgcggtgccgctggtgtgaacgggtccgatggtaaagacggtaaggatggccgttctgtggtgtccgtgtactgttccggggggcgcctgtttgtgaaatatagtgacggtgtggcttctacaatatcgggctcggtggcatgccagggtgtggccccgtcacctgtggttaccgtatcatcccgcaaatgaatgatagtggaagggtgttactcatgttgatagtagtgtttgggggtggtgtgtggtgagatacattccagcggcgcatcactcggccggctcgaatagtccggtgaatagggttgtgattcacgcgacatgcccggatgtggggtttccgtccgcctcgcgtaaagggcgggcggtgtccacggcaaactattttgcttccccatcgtctggtggttcggcgcattatgtgtgcgatattggggagacggtgcagtgcctgtccgagagcactatcgggtggcatgccccgccgaatccgcattctttgggtatagagatttgcgcggatggcggctcgcacgcctcgttccgtgtaccagggcatgcttacactcgggagcagtggcttgatcctcgcgtgtggcctgcagttgagagggctgcggtgctgtgccggcagttgtgtaacaagcatggtgttccgaaaaggaaactgtctgtggctgatttgaaggctggccggcggggtgtttgcgggcacgtggatgttacggatgcgtggcatcagtcggatcatgacgatcctgggccgtggtttccgtgggacaggtttatggccgtagtctgcggcggtagtggtagkgaggagttaactgtggctgatgtgaaagctttacatgatcagattaaacaattgtctgcccagcttactggttcggtgaataagctgcaccatgatgttggtgtggtgcaggtgcagaatggtgatttgggtaaacgtgtggatgccctgtcgtgggtgaagaatccggtgacggggaagctgtggcgcactaaggatgctttgtggagtgtctggtattacgtgctggagtgtcgtagccgtattgacaggctcgagtctgctgtcaacgatttaaagaagtgatgtgttgtgggtaaacagttttggttgggtttgtttgagcgtgccctgaaaacttttattcaaacgtttgttgctgtgcttggggttactgcgggtgtcacgtatactgcggagtcgtttcgggggcttccgtgggagtctgccctgattacggccggggtggctgctgtcctgtcggttgccacctcgtttggtaacccgtcgtttgtggccggcaatccgaagacgcctatggatgctgggcttgttccaccggatgacgggggcttggttgagccgcactcggtggatgtgtcggatcctggcatgattgagccgatggatgatgcggatgttgccggctatgtgccgaagcgtgccgccgagtctgaggttggcacggtagagtctactgttgcataattgaatatgtgtgtgtgccccagcggtgctgccacgacgtgtggtggttgctgctggggcactatttttgtgtctacaggggttttacaggttgtcgtctagggtgtcttcgagtgtctgttgtaggagtgcacactcggcgagggtgtcttcagcctggtcgacaatgttttgttttgctatgcctggatagttgtcgcggtgattgtagatggcttccagaatgttgtctgccatgatttgtagtgttagggcctggttggtgatgcattccagctcgtctagggcggcctggctagcctccggttgccggttgtccggatgttctgcaaggttgcagtcccacaggatttcttggcatgcatccctggtgtctgcgtccacatcgatgtcgtctaggctgacaccgttggcgttgaggctgatgttgtcgaggttgatgtggacgcagatattcgctgctgatgctgcaggtgatgtttgcgagttctgtcatgtttcgtggctgctgctgtataatgcggcgggccgcggttttgagggctgtgactgttcggtgtctgttactgggcatcgtttctattcttcttccccggtgtagctggtggtgttggtgtactgggtgagtgtgatcaggcactggtcggcccactgtttcaccgtctgccgtgtcacactcaatcgttgggctgccaccgaataggtttgatcatacccgtagacttccctgaatgcggcaagccgtgctagccgtttccgctgtttggatggttcacatgtgagggtgtagtcgtcgatggccagttgtagatcgatcatggctacaatgttgttgccgtggtgttgtggcgcggttggkgggggtggcatgcccggttcgacactcggtttccatgggccgccgttccagatccattgggcggcttggatgatgtcggctgtggtgtaggtttggttcactggtcatccccggaataggttgtcgaggttgtctgggttgctggtgttggtggtgtcgaatcgtcccacacagtggcagtagtcgtacatgagtttgatgatgtgttggtggtcgccgaggtaggtgtttccgctgatgctgtaggtggctgtgccgtcttttgcgatggtgtatttggcggtgattgtttcgggtgtttcggtgttggtgatgattgctgtggtggtggtgcctacggtttgtagcctggtggtttgggttccgtcgtcgaggatggtagtaaccatgagggttgtcctttagatgctggtttggttgtcggctagatgaataatatcggataaaggtttcggctggtctaggtgttgtatggttttgttggctagccgtttggctaccctgtaacacattttggtatagtgtttgttgtctaggttgtggtattgttcccgcaccgcaatatatagtagggagtcttggtacaggtcgtctgcactgattgctgggtagtgtccggctgttttggtgcatgcccggttgagtgtgcggagatgatggtttgtggcccacacccacgatgcggtggtggccaggtctgcttttgttggtcgtctgctcatggcactatttcatctcgctatctggtagttgtttggtgttttgttgttgatagtgtagcacacgagtccggggttgccggtggtgcctgtgcggtgccggtaccagacggattctccttccatggatgggcattggatgaaggtgcgttgtccttgctcagagatttctaggtggtgccggtgccctgccatgaggatgtgagatgtggtgccgttgtggaattcttggccgcgccaccattcgtagtgttggttgttgcgccattggtgtccgtgggcgtgcaggatttgtgtgcctgccacatcgacggtggtggtcatttcgtcccggctggggaagtggaagtgaaggttgggatactggttggtgatctggtaggcttctgcgatggcgcggcagcagtccacgtcgaaggagtcatcgtaggtggtgactcctttgccgaagcgtactgcttcaccgtggttgccggggatggaggttacggtgacgttggcgcagtggtcgaacatgtggacgagttgcatcatggccatgcgggtgagcctgatttgttccgtcaagggtgtttgtgtgcgccaggcgttgttgcctccttgtgacacgtatccttcgatcatgtcgccgaggaaggcgatgtggactcgttcggggttgccggcttgctgccagtagtgttttgcagcggtgagggagcgcaaatagtcgtcggcgaatcggctggtttctccgccggggatgcctttgcctatttggaagtcgcctgccccgatgacgaatgcggttttactgtctgttgtggtgttgtctgttgtgggtggctgccagtcggctagcttagctacgagttcatctacaggatatgggtctgttgcgggttggtggtcgatgattttttgtacggatcggcctgtttccccgttcggtaaggtccattcggagatgcgtgtacggcgcacggttccgttggctagatcatcattaatggtgtcgatggcgttgtcgtggttggctagctgtgtgaggagccggtcaatattgtctatcactggttttcctcctccttctgggggttggtttgtttgcggcgataatctttaataacggtggctgagatggggtatccggcttgggtgagctgttttgctagccatgaggcggggatggttttgtcggcgagcacgtctgcggctttgttgccgtagtgttgaataagggtttcagttttggttgccatgatgtcctaggggttgtgtggtgggctgccatcctgtgcggcagtcgccgtcgtgtcctggtttgcgtgtgcaccacgtgatggttccgtctgtgtggtggagtgttttgccgcacatgacgttttgtagatgctccggcagtgcgccgtcatcctggttgctggtttgtgtgtcgaagagtgttttctggttggtgaaatgctctgacacggtgccgttatgcacgggtagtatccatgttttccattgttgttgtagccgtgtgttccagtggaattgtttggcggcgttttctgcctgttttatggttttgtagtagccgactagtatgcgctggtgttcactgtcgggtgggttttggcctcgccagtattgtgctgctacggcgtaacggttgttttctgtgaaggtgttccagcagtattcgataatgttgttgagtgtgtcgtctgtaacatctgtgtcgctgtttagtgtttcttgggcgatgatgtcgcggatggcttgccgattttttgtggtgggtttgaaggtgatgctcacgatagtaccggctcgtcttgcaggaactggttgaaggtgttgttcccggcgtgttgggcttgtgtgatgtcctggtcggtccagtcggggtgttgctgtttcagatagtaccagcggcacgcattgtaggtttcgtcttgtagccgtgtgagatggttttcggtgatgatttgtttccacattgtccatgacacgtcgagccggtccaatatttccattgctgggatgttgaattggtcgaggaagagtatttcgtgggtgtagtattccttctcgtactggtcccatccgcttcggtgcctgttgggctggtttttggggtaggcttcccggcatactttgtgcaaacgtttggccatgtcgtcgggtagtttaatgtcagggttggcgcggatcatggatcgcatcccatcataggtggtgccccaggtgtgcatgatgcggagtgggtcttcaccgtcggcccatttttctgcacagatggcgaggcgtatacgcctcctggctgtttggctggtgttgcgccggttggggatggggcacgtgtcgaggggatccatgatgttttagtgtacctttctggtttcgtgttgttgacgtgttttactgtagcacagtgtttagtgcttgtgtcaaccctgtttttccggcctgcaggtaggtgtctgtgacatcccccagggtgaggggcacgtggatggcttgggggagtgcggtttggagggtttgggccatctggtctcccgctttgtctgggtctgaccagatgtagatgtggtcgtagccttcgaagaatttggtccaaaagttttgccacgaggttgcgccgggtagggctacggctggccatccgcattgttcgaggatcatggagtcgaattcgccttcgcaaatgtgcatttcggctgccgggttggccatggcggccatgttgtagatggagcctgtgtctcctgccggggttaggtatttggggtggttgtgggttttgcagtcgtgcgggagtgagcagcggaaacgcatttttcgtatttcggctggccgcccccaaacggggtacatgtaggggatggtgatgcactgattgtagtcttcgtggctggggatggggtcattgtcgatgtatccaaggtggtggtagcgggctgtttcttcgctgatgcctcttgctgagagcaggtcgagtatgttttcgaggtgggtttcgtagagggccgaggctttctggattcggcggcgttccgcaatgttgtatgggcgtatgctgtcgtacattcgggttttcttcttctaatcgttgttgtagtttggcgaggcctcctccaacaccgcatgtgtggcagtaccagactccttttgtgaggttgatgctcatggagggctggtggtcgtcgtgaaacgggcagagtatgtgttgctcgttcctggatggattgtaccgtatgcggtaggtgtcgaggaggcggcaggtgtcagaggtgtgggaggagctcgttgagggttgataccacataggcttcactccatggcttgttgcgctgtttcatcacgacgagtccgatagtggactggctggttttgtttcggtgtgtttcgtagttgcgcgcctcggttgtggcttctttcacgaattgagccaaatgctgctggccagccttggcttcgatcacatatgttttgttgccggttgtgaggatgaggtcgccttcatcttcgcggccgttgaggtggaggcgttcgatattgtggccggtgttgcgtagctggtggaggagtcgtgtttcccattcggcccctgcccgccggttgcgtgcctgctgtgttggcattgtttagagtcctttgtgtgttgtggtcatgttccagggctgtttttcgacgaggggcccaaaaaaggtgtattcggggtaggctcgtagccgctcgtatcgggtgccgtcggggctggatttgcctgtgcgctgtttgagtacggcgatgcgtgcctctgccggtatcgatagcccgttgccgttatcctcaccaccatacaatgagactccgaggatgagttgtggtttttcggagaggccgtttttgatttccctccggtggggcgggtgttcgatgtcggatccggttttgtcggtggcgtggtgggkgacaataatggtggagccggtatccctacctaatgctgtgatccattgcatggcttcttgttgtgcctggtagtcactctcgcagtcttggatgtccatcaggttgtcgataacaatgatggggggaaagtggttccacatttccatgtaggcttgtaactccatggtgatgtcggtccatgtgatgggtgactggaatgagaatgtgatgtgttggccgtggtggatgctgtctcgatagtattctggcccgtagtcgtcgatgttttgttgtatctgggcggtggtgtgttgggtgttgagtgagatgattcgtgtggaggcctcccagggtgtcatgtcccctgatatgtagagggcgggctggttgagcatcgctgtgatgaacatggctagcccggatttttggctgccggagcgccccgcaatcatcaccaaatcccctttgtggatgtgcatgtccaggttgcggtagaggggttctagctggggtatgcggggcagttcggcggctgtttgggaggctctctcgaaggatcgttgtagagagagcatcgggaccttaatctatctatcggttggatgtgtattggtggtcagatggagtcaatgtctacatcatcgctgccagtggtgttgggctggctgtctcgcttgtcaacgtaggctgctacgaggtcgtagatggcgtcgtcgaggggtttgaggatgacagcgttgaatccgtttttggtgcgcacggtggcgagtttgaaggcctgctcctcgccaaggtaggtttcgagttcgcggatcatggagtgtgggcggtcgttgttgcctcgcgctttttcgatgatggcgttggtgrtggtttctggggtgccgttgttgaggtcgtctagggtgtggaagatggtgacatcggcgtagatgcggtcggcgacctgtccgccgtagccttcagtgttgtgttcgacgtcgtgtactttgaagacgatggcggtggcgtcctggtttttggacgggttgaagaaggtgctgctgttgctgttgttgcggtagttggcgagtcccataacggtatcctttgcttgctttttgtgttgttttgttggtttgtgtcggtttttatcgggtgrggttgttccgtttagtgcggaaagcctcggatacgtcactgttactggtgatgatctttttgtactgtttgagtagatcggctagctgtgccttgcttgttgctttgttgattttgttgatgatgatgtcgttttcttgattggcaatattgtttacgtagtttttggcggcctggttgtatcggtcttggaggatgatggatgcgcttgctaccaaggtggctaaatcccagtctttggatacggtgttgtctttgagcccgccgaggaggtcgatgatagtcttcttcacctggtcggcggtgtcgccgcggatgacggtccatggtgctgcgtagtctccaccgtatttgagtgtgatcgttaggcgatcattgtctgtgatatgctcgtcgatcatttggtgtccttttctttatggtctgtttctggtggctgtacggtggtttctatcgggtatctgtacgagtttttgccgttgacggcccagcaggcgtcttgtacggggcatcctttgcagagtgttgtgacgtgtggtacgaagattccttggctgattcctttcattgcttgactgtacatggatgatacatgccggtaggtgttgttgtcaaggtcgtagagttcggttgccgtgccttgtgtcggggatttgttgtcgttgcgactggtggccggcgtccaaaacatgccttttgtcacatcgttgccgtgttggttgagcatgtaccggtatgtgtgcagctgcatactgtctgctggtaggcgtcctgttttgaggtcgaggatgaatgtttcgccggtgtctgtgttggtgaagactcggtcaatatatccgactatttttgtgtcatcgtcgaggatggtttctaccgggtattcgatgcccggcttgccatcaataacagcgatagcatattcggggtgactgtttcgccagtgtttccacctgtccacaaagacttggccgtagagcatccaccagtcgtagtcttttttgttagggcccccactttcgcacatgtttttgcatactctgccggagggtttgatttctgtgccttcggattcggcgagggcgacttgggtgtcgaaaatgtttttgaaggatgagagtttgtctggtagtgcagggtattcggtggggttgtacaggtggaggtcgtactgttcggtgatgtggtgtatggcgcttccggcgatggtggcataccaggtgtggtgctgtgcatggtagccgtgttggaggcgccatttttctccgcattcggcccactgcgacagtgagctgtaggagatgtggcctggatggttgatggttttcggatattgtgctagaggcattacttgtcgcttttgttccatgggttgcgggtgtcttggccggcgtggtgttgctggtaggcgaggagtgcgaggcagtgccaggctgcgtgtgccagatgcggcaaatgtgattcgtggtcgaggttgttgccttgctgccatgatagtagatgcctgtagagggcgtcgacactgtggctccacgggtatcctccggtccagttgttgtcgccgtatttggkggcgccgtatcctgccacagagcctagatcgtgcaaggctgcggggtcgatgagggagagcctgcagagtttgagttcttttcgggcacctgtgttggggtcggtgtacatgcgggtgggctcatccatggggtgtgtgctccttaagggtgggttactggttgttgttttgggctagggctacggcgagaataatgatggcgagggtttcagcaatgatgatgggtgttgtgatcatttagtattacggggattgttggtgagggttgaggcacctagtagggtggcgagggcgcatgcggcgatgatggcgagggcggctttgtggctggtgcctgttgcgtacatccatgtgatgatgccgccttggatccaggcgaggctggtgaagaacgtttcgtagctgtggaggttggcgtcggttggtgtgttcattcttgttcctcgatggtgtggttgattgttttgtagatgtcgtatagttgtgcttcgatttccagtagtgtgtttatttcgtttgtgaggtcgatttctgttttgagtgtgtctattctggaagcgatgtcagtggctgtttggagtgagagttcggcgccgtggatgatgtggccgatatcggagaggccgactttggctgtgtagtctgacatgagagacattggacgtccttagcgtgctgggttgatggacaggtcatctacctgtgggttgtcttctgtgccggagacttggcagaagactttcacctgcgtcttggaagcgccaggttggcgtgccgtagccccgtaggcgatcgagaaggtgtcttttttgctgccgatcactttgtggaggaagaggtcgatgtccgggttgccgttccatttgacgccgttttctgcggcaatctgggtggctttggcgtcgcaggcgtgtgctgccgtaattatggtgagtccggttgcggtttcttcaccccttgattgggcttgcttgtgggttttggcctgctcggcttgtagggagcggactgctgcggcctgcttggctgctttttcggctttgcgctgttgggtagtcttgggggtccatgtggtgttggctgtggtggcttgtggggcgggttgtgaggtgagtggcggattgtcgtcaggtgcagggaggaaagagcatgcggcaataatggcgatagtggcgcctgcgatggtgtagccgtttttcttgttcatgttttgtgtcccctttccggggtgttgttcgttgctgacatgatcaataatggtgtgggcggtggcctgtgtcaaggctgcgctcaacgactgtgagcgtttggtgtgtggcttggggttttatcgggcgcatagggtgagtaggtggccgatgttgatgcgggtcacgttccagtagagttgcgkggcttcaccgccagtgagcggcttccactcatcatggctgaacacggtgccgtcggtggctatgaatgtgttggggcgtagcttgtggagttcggcttcaacatgctgccggtagacttcggcgaggccctcaaaatccaggtggtcgcaggagaggttttcgaggcgtgtcaagtcgaaaggctcagggcagtcgtagctggctgggctgtagagctgggtgaagtggtcggcaatcttctgcatgacgggttccttttctagtgtgtggatggtttttatcgggtggatgcgacaaggatggcgtctacgtcgatcatgtcgatgagatcgtggagttcctcggcctcattctcagataggtggcgccagtcgtagtcgccgtacacggcgccgtctagggtgacagtccacagtggccggatgagccgtatggcttcttgtactttagcgtggtacatgcggcgcaccatatccagatcgatgtcgtctgaatggtttccggtgagactgtcgaggctgagggggtcgatttctgtctgcctgtagagactggtgaaggatggtgtgatgagtgtgccatccatgggggtgctcctttctggattgtttgggttggttgttgtggtttctagggtgtgcaggttgtgacccacagtcaaggctgcgctcattcggattgagtgtttcatgctggagtgtcgggtgtgacagatatcactgaagcctttattgcctctctcagcgtctcaaatcttctgggggtaggattatgcagggttgaccctgttagtcgattctagaggccttctagggcgtctcaggggtatgtctgggggatagcaggtccggtagatgacccagcagatctaccttggctttcatcacgggagtcgaggtgccatatttgggcatgggatctccaccctcatactatgtgagatgtaccacatcctcctggcttgatgtgcactctcgaggccactctaccgatctggcgtggagggtgtagcccagaaatgccgtttaaagccttcacacggcgcctaggagcgtcttgcagggtgggggctaggtatttatacccccagcacattctggtcgattctagacgcctacaggagacagatacgcgatcaaccctctcggcatagatcatcagcccctaccctgcttagctaagcctgcactatgtggacagtgttggatgctgtgggggaagaagggcacggtaaaagaaagaaggggggagtatcagccttcacgcctgaggtacttaagttaaccttaaggtcttagcacttagcaccgagcccctcaagggctcggcatcagcccgaacaggctcagctgatccggcatagccttagcaagtacacgccatcagggaaggcttgagagtacgaggagcctcagcgacgagtactcgaaagcctgagggaagaccatcagcacatcaacgcttagcgtgttcggaaaggacacaggagtacagtgtgagagctgttcgggagtgaaacccgttctggctaggggtttcagccttaaccacctgtaaaggttacaagactctaagaaaatttaaggaaaagtttaggtttgatttttggacctttactaccaaaaacacccgtttacacccctcaaacccgcctatagagccaaacgccggtgttgagggtatctctacctagtgtgataggctggacaggtagccagctggacgcaaggccagaaagtgctaacgcacttcccgacctcgcttaccatcagtctaccaaagacttaaaagcttaacagctaagcgctaagcccttaagacctcaacgcttagcaccgagcccctcaagggctcggcatcagtcctaaggcttaaacacttaaagtaactataaagctttaaaagcttaacacttaataatttaagtaaatataaaaccttaacagttaaacgtttaaagctttaaaacttaacactacagtaagagttaaaagcttataaaccttaacacctaagttaactataaaaccttaaagactaagcacttaaggatataaacttaacatcagtgtttaagactttaaaacttaaagtaactataaaacattaaagctttaaatacttaaagttaaccatcagtcttaaactttaatattataacctataagctttaagacttataggtattataatatattataattatataagttataaaagttttagaagagtaaaggggttaacttctttacttctctactctctttggttctttctctcttctcttcttttcttcatcaggggagaagaggaaccttttaccgtcagcgctgatggtctttcgccgtgtgtctcgtgtgcttggtcgcaagctcccgtcgcacactctccacactcttacacccgtgtccttcttaggcttggcgtgttcggctgaaggcgtacggcgtgtcacgctaacacccttaacataaggtaagacttaaagtgtatattatatgtagaagactttaaaaaccttaagggtgtacacgttttggctgtgccctacaccgctaggcgtcaagcgctaagccttaaaacgcgaacacacacccaccccccttttttctttcgtgtccttctcttttgacaccgctggggggcgatgtgacatttctcacacccgtgggggtagtggagaaaacaaacaccccaccacagacagaacaccccctcaaacgcacaaaacagcccctagaatcgattagcagggcaagggcaaggtattcatacccccaacggtttccaggccgttacagaggcaaacaagacccgtacaaggctaggcgaggatcggagacgtgatggcacacaccaaccgcaccgcatcctcagcccaccgccgctggcggcaacgactcatcacccaagcccgacagcaaggccaaaccgaatgcccactctgcggagtcaccatcacctgggacacctaccagctaccaaccagccccgaagccgaccacatcacaccagtcagccgcgggggactcaacaccctcgacaacggccaaatcatctgtagaacatgcaacagaagcaaaggcaacagaacacaaccaaacattcaattccaacaacaaaccacaaaaacattgattccgtggtgataaaacccgccaacccccaccgggaccatcccctgcacacccgtgcaa

SEQ ID NO: 51 - DNA, 2299 bp, Propionibacterium acnes
ttggtcagcgcccaccgatgccttacaccgtgacacgctcgaagtggcgatggaacacctacgcttcgaacctgattcgatcgcttcggtggcctcctgctgacgctttcatggatcgtgtcagcctggaggatggtaatgcgcccaaaactgtatgtcttcggtagatctgcacaagcggatcatctcgcgcaagaaggaaccgtgaggtactcgatccggtacactctccacatcaaaaccaacaatacaagtcacagtcatagatagttgtgtcattaacaagaaatcccaacagcaccccaatgcaaaattgcacagaacgacctagccagatgattttcagcaagtctaccatgacagcaaaggccgcagatagaaactgtgacatatacattgcacgctgaacttactaccccaccactaaatttacatagattccataccgacccgaacgccaccagtcaaccatcagtaatcatcatcgagaagtcaaaaataaccaacaccattgataagatccatgccatggacgggcagacgtctgtgatcagcagagtcgagaaacgaggtaaagcaaactatcacgagccaccagataatacccctagaagcttgtccaatatgttagctctggttaacatgccatcgccagcacaagattaacacgcttgttcatgtcttcagaaagcaacgaagctcgcctagatacttggacatttatatccttgcaaacccccccctaaagcctccaaaaatccttgatttacctcactaatataccattaatttgccccacctcaagccaacaaaagaacggagcatcagagccataggaagcctccgccagacataggggactaaacattatctccttctacgtcaccaactagaattcataaagcatcaacctacttatttaattcgatctaaaatccaatatccttagtatcagggatcaataaaaccaaaattaggaaacatacttaaaatcatgacatttcacttagtagacatactttgggattgtatcgacgcgtgacattgacacccatatttctgcggcagaatgcaccccggcaatccattgccaacatgcatgacacaccagcccatcagacccgaggtgaggtgatacactgttggagttagttcctggtacgcaaaccgcacagcccggtaggaagtccgggcggcgcaatagacgtccgtcgctcccctcatggagaatccagtgtcgccaggtccgcttcggcgtactgggagatgatatgcctacgatgttcactgtctacttcgatggccagttctgggtcggagtcctagagaggcgcgacgagggtttggtgcgtgccgtaaaagtcacgtttggcgccgaaccgtctgacacggaattgtacgagtgggttagccgtcatggcaacgcacttatagagcgattggagtctaccgctgctgtccctaccacccgcagtccccgagccaagcgactgaaccccaagagggcgttacgagatgcagcgcgagctgcccaagcaccccgtgccagcacggccgcacaggccgcgcttaaggccgatcaggaagctcggggtcgcgccgccacagtgaagcgcaagcaggcccggatcgacaaagctgcggagcagtgggctaagaaacgagagcgcgcgaaggcaaagcaccgtggccactaatgcgtcgaccgtgcccttcccaactgtgattcttggttcgggacctatggcttcacggtcaaggcggtcaaatcgctcacacatgagtactattcacccgacatgccatcgtctgggcaatcacccaactgcaagctgatgacgttttcctcctaggcttgatgcactagtttagtgtggacaggaagactcatggcgaagggaacggcctgttctcaagatcgccaccgcgaacgagattcacttcccacggtgtacgcatactaaggggcggagcttgtctgacatcatctgggccagcacgcacatggcccagatgatgcccaccggatggtgagcctgacccgtaacaagaacgcatcagcgagcacctcgccgacgcggctgcgcacgcggtcgtaacctcgccactgcctgcgtgaacaacgcgcttcggcgcattcaacacgccgtgaccgcggcgcccacggcttgcgcaaccgctacaactaccacctactgtcgcctcctggtcgttggcggcataacccataaccatcttcaaatccgaagcgccgagtcctgccataattcgaaccttcagcctgcatgactggaacaag

SEQ ID NO: 52 - DNA, 2299 bp, Propionibacterium acnes; identical to SEQ ID NO: 51

SEQ ID NO: 53 - DNA, 2299 bp, Propionibacterium acnes; identical to SEQ ID NO: 51

SEQ ID NO: 54 - DNA, 2298 bp, Propionibacterium acnes
ttggtcagcgcccaccgatgccttacaccgtgacacgctcgaagtggcgatggaacacctacgcttcgaacctgattcgatcgcttcggtggcctcctgctgacgctttcatggatcgtgtcagcctggaggatggtaatgcgcccaaaactgtatgtcttcggtagatctgcacaagcggatcatctcgcgcaagaaggaaccgtgaggtactcgatccggtacactctccacatcaaaaccaacaatacaagtcacagtcatagatagttgtgtcattaacaagaaatcccaacagcaccccaatgcaaaattgcacagaacgacctagccagatgattttcagcaagtctaccatgacagcaaaggccgcagatagaaactgtgacatatacattgcacgctgaacttactaccccaccactaaatttacatagattccataccgacccgaacgccaccagtcaaccatcagtaatcatcatcgagaagtcaaaaataaccaacaccattgataagatccatgccatggacgggcagacgtctgtgatcagcagagtcgagaaacgaggtaaagcaaactatcacgagccaccagataatacccctagaagcttgtccaatatgttagctctggttaacatgccatcgccagcacaagattaacacgcttgttcatgtcttcagaaagcaacgaagctcgcctagatacttggacatttatatccttgcaaaccccccctaaagcctccaaaaatccttgatttacctcactaatataccattaatttgccccacctcaagccaacaaaagaacggagcatcagagccataggaagcctccgccagacataggggactaaacattatctccttctacgtcaccaactagaattcataaagcatcaacctacttatttaattcgatctaaaatccaatatccttagtatcagggatcaataaaaccaaaattaggaaacatacttaaaatcatgacatttcacttagtagacatactttgggattgtatcgacgcgtgacattgacacccatatttctgcggcagaatgcaccccggcaatccattgccaacatgcatgacacaccagcccatcagacccgaggtgaggtgatacactgttggagttagttcctggtacgcaaaccgcacagcccggtaggaagtccgggcggcgcaatagacgtccgtcgctcccctcatggagaatccagtgtcgccaggtccgcttcggcgtactgggagatgatatgcctacgatgttcactgtctacttcgatggccagttctgggtcggagtcctagagaggcgcgacgagggtttggtgcgtgccgtaaaagtcacgtttggcgccgaaccgtctgacacggaattgtacgagtgggttagccgtcatggcaacgcacttatagagcgattggagtctaccgctgctgtccctaccacccgcagtccccgagccaagcgactgaaccccaagagggcgttacgagatgcagcgcgagctgcccaagcaccccgtgccagcacggccgcacaggccgcgcttaaggccgatcaggaagctcggggtcgcgccgccacagtgaagcgcaagcaggcccggatcgacaaagctgcggagcagtgggctaagaaacgagagcgcgcgaaggcaaagcaccgtggccactaatgcgtcgaccgtgcccttcccaactgtgattcttggttcgggacctatggcttcacggtcaaggcggtcaaatcgctcacacatgagtactattcacccgacatgccatcgtctgggcaatcacccaactgcaagctgatgacgttttcctcctaggcttgatgcactagtttagtgtggacaggaagactcatggcgaagggaacggcctgttctcaagatcgccaccgcgaacgagattcacttcccacggtgtacgcatactaaggggcggagcttgtctgacatcatctgggccagcacgcacatggcccagatgatgcccaccggatggtgagcctgacccgtaacaagaacgcatcagcgagcacctcgccgacgcggctgcgcacgcggtcgtaacctcgccactgcctgcgtgaacaacgcgcttcggcgcattcaacacgccgtgaccgcggcgcccacggcttgcgcaaccgctacaactaccacctactgtcgcctcctggtcgttggcggcataacccataaccatcttcaaatccgaagcgccgagtcctgccataattcgaaccttcagcctgcatgactggaacaag

SEQ ID NO: 55 - DNA, 26003 bp, Propionibacterium acnes
cccgctcactgccaacgagacatcacgcagcagcggccgaccatcggccagcgtgtacgtcaccgacgcgacatcgagacgaaccatgacccaaaagtatcacacgtgtgataaatggaggttgagtatggcggcctgttcacttgatcaggcatttcttttagtgaggcctggggcgtaaccacttgtctgcaccttagagctgccacgcctcttgcagatcgaggcagaggaggctgcgcgggggtcgtggcgtgcggtggcggggtttgatgtcacgttcagtgtgccgaagtcggcatcggtgttgtgggcggttgcggacgcggggacgcaggcgttgattgcgcaggcccatcatgagacggttgtggcggtggttgcattcatggagtgcgaggttgcagccatccgcacgggtgcaactgctggggatggcgcggttgcacaggtcgacgtgacgggtttgatcacttcgattcccgcgccggggacccgcacttgcatacgcatgtggtgatcagcaacaaggcccgcacggtcctggatgggaagtggcggagtttggatgggcgttcgatgcatgccgcggtcttggcgctgtcggagctgcacgaggccgtgttcgccgatcacatgacccgcacgttcggtgtgacgtaggagccgcgggagatgggccaggaccggaacccgtcgtgggcgatcaccgacgtccccgaacagctggtggcagagttctcgacccgcgcccggcacatcaacgaggcgaccgacgcgctggttgctgactacgtggcccagcacgggaagcgcccttcgccggcgaccatcatgaaactgcgcgcccaggccacgctcgcgacccgtccggagaagcaggtccgctcacttgcggagctaacagccgagtggcgcactcgtgtcagccagcagctcggtgtggatgccaccgtgtgggcgcggaccgtcacgggtggggagcggcagttgctgttgcgggctggtgatgtgccgttggatctgatcgaggggtggggcggtctgtagtcgagatggtcggtgagaagcgttcgacgtggcggtgctggaacctgatggccgaagtcgcctgccagactgtggggtggcgtttcgccaccgttgaggaccgcgaagtcatcaccgcgatggttgccgacgcagcggaacaggcgtccttacgcctgaccccacccgagctagcgaccagcccggcgaagttccgccgcccggacggcactagcgtatttcgtccgaagcactccacggtgttctcctccgacagcctcctggccgcagaggaccacctcctgcaacgggcccgcaccgcgaccggtccgactatcgacctgaccaccgtggggaccatcacgagcaaggcggacagcgagggtcgggtgctcggtcccgatcaggccgcagctttggcgtcggtcgcggtcccgggccgggtggtggatgtgttggtggggccggcgggggctgggaagactgcagcgatgaacgcaccgcgccgggcgtgggagacggagcatggtgccgggtcggtggtggggttggctccgtcggcggtggcggcccaggtgctggccgatgatctgaggattgccacggagaacacggcgaagtggtggaccacccaccaacacaccggcgtcactttcaaggctggtcagctggtcatcatcgacgaagcttccctcgctgagaccctctctttgaatcggatcacgctggctgctgaggaggcggggacgaaggtgctgctggttggcgactatgcccagctcccgtccgtcgatgccggtggtgcgttcagcctgttgatccacgaccgccacgatgcccccgagctggtcgatgtccaccgcttcacccacgcctgggagaagaccgcatccctggagctgcggcacggccgcaccccggtcatcgacacctacctggcacaggatcgcatccacgacggagacgccgaggccgtgaccgctgccgcttacaccgcctggcgccacgaccggcagcaggggttggcgtcagtactgatcgccgaaacccgcgagaacgtcaccgccctcaacatccacacccgcgctgacctcatcctggacagcacgttgaagcctggccccgaaatcaccctgtccgacgggtccatggcaggcgtgggtgacacgatcatcacccgccgtaacgaccggcggctgcggaaccggcacggctgggtccacaacggccaaacctggaccatcactgccgtgcgtgacgatgggtcggtcacgatccgcccacccagtgcccggttcggcaacagcatcgtcctacccgccgactacgtggctgagcacgtcgacctcggctacgccgtcaccgctcaccgcgcccaaagcatcacaccgacaccgcccacgtcctcgtcgaacccacggcgacgcgggaaacctgtatgtggctatgacgcgcgggcgcgaatcgaaccgggcctacgtcatcctcgaccgtgccgacgaccacgccgccggcgccgtgtgccgtgtgaactcggtcgacagccccggacgctgggtcgcgcggtccgtgatgagttcgtcgacgtcggcagcggaggtaaccaggcgtgcgtggccggtacggagcagctcgtgcgcaccacggctggtgacaggccccggcaccgcaccgacctggcgtccgagctggtgggcctcggacgctacccgaagcgcccccgatcgcgcgccggcctcaacgaccaccgttgctgctgacattgcctccaagcagtcgggagcgggctaggagccgatgccgcgtcgacacggatccgggaggaagctcgctggtcagcgcactcacatcacccacccggtccagcaagtcacggtggccgctcgggtcggggcggttcacgccaccgccaacaccgcacggtgcacagcagcctcgacaccattaagcgtcaccagccaccagtacacgctcacggttcgcgaggtcgccagccagctcggcggcgacatgctccccatacgcggaagccgcccgagaacccgtgaccgtcaccagatcgttccacggtcgcgccaagaacgacgccgcgccccgcacgaacagaataaacggagcgcggtcgcccagatcatccagcgcctgtggccagtgcgcgtcacccggaatcagagtggcgatcccgctctcctcgaccatgcgcagccgctgggcgagcccatccagcctgcccggtgaggtgaggtggtcacgccacacctgaccatcaactcgactcagaccaggcacggtggtcgtgtcggtgtcaagcagcccgagcgtctcaacggcacccaggcggcgcatcagcccgcccgtgacgggatcatcaggctccgccaacagcgccagcaccacccgggcacgacgttcatcaacaccaagcccagcaacaccagacatgacggctcctcctcgaacagacttcgccgaacaggtgcgccaacgcagcccgcaggtgtcgcgacgtcctcagcccgtggaggctggcgaacgcggtaacattcgacagtcgcacggttcggcagctcgacacagcagcgtgctggtgttgctttggaggagtccacgggcctcgccccccacaacggtgacttcaatcgacattgtcgttgttggtgatcgaggtgtcaccgcagctgcgaacgatagtcttgatctggacaacgatttcgatgcggaggaaagcacatgaggctcacacgcttcaaggtcgagaaccataggcggttggccgacctcgacattgaggtgcgcgaccaccttgtgctggttggagccaacgacgttgggaagtcctcgctgctccggtgcctcgatttgctgctcggggcgagtacggcgcagctctactcccgtatttcggccgacgatttccgagcccccgaccaaccgttcgtgattgaagggactctcgcggacttcaccgatgtcgacaaggctctgtttcccgatgagatccacgtcgacccgaacacgaatccttcgcgtctggtgattaggctcacggcgactgtggatgagaacgagacggtggtgatcagtcgttcggcccccgagggcggaacaggacgccagctctcacgggatcaggtgcttggcctgggatggaagttcctcagcgcaaccgcccagacccgcgaccttcgggaagaccgaaagtcggcactcgacgacatccttcaagctgtcgacttgggtgaagaggaggccgcgttcgaagccatcgcaaagagcctgacgaccaccttgggtagctctaaggtgcttgaaggcctccgaggttcacttgctgaccagctgtcgaaggctctgccggacaaggtggcacaggatgacttggcgttcgtgcctggagctgctgccgacaatgacgtcctcagcgacgtgcggctgcaagtcagcaagcaaggcgtggcacccgatctttccgaacagtcagacggcacgcgagcgctctacgcgatcgccctctacgatctgatgagcgtcggcgctaacatggtggggattgacgagcccgagatccatctacacccgagcagtcagcgaagcctcgcgcgcctcctgcggtcgaacgccaaccagaaggtcatcgctacgcattctgccgacatcgtaggagccttcgatccagattctattgtcgttgtgcggggcggaggcgaagccgttcaacccaaggctggattcctgtcggacgatgagcgaatggcagtacgcctgtgggtgagggatcggctcgaaccactcactgcacgtcgtgtcgttgtcgtggaaggcatctcagatcggatcatcctggagcacctggccgacctcaccgaccgaaatctcgaccggctcggcgtgtccttgattgaggctggcgggtgtggcgacatggggccgctcgacaagctctttggtgccaatggcttccgtgtatccatgtcgcaactcatcgatgcagatgcagaagaggcattggcaaagaaactgggagtcgaagttgctgaccttgcaggccgatccgtctgggtctcgcgaagcgacctcgaagacgagtacgttcgtgcgctcggctcggacgccgtgtggacagcactccagtcaaatggccacttctcgaagaatgaacttggcaactgcgcagcaagtgggccggctggcacgcgtaccgagatagatgttgctgccttctgtcgacgaaaggcgtacaaagtaaatgccgcgctatcagtcctgccgctcttcacggcggcgaatgccacgcaggtgtcgtctatcgagagtctactcgaagagatcgtggcgtagatggtcagcccgactcagaagcagattgacattagggacacgcgggttctcgatcttcttgtcgttgctcctgcgggatgcggcaagacggaagcgcttgcattacgaatccaaggacttcttcaccgcggcgatgtgactgccccaaagaagatcttggtgacaacattctcgaaccgagcccgcgacaacatcagagaacgattggggtcctacctgacgccttcggtaatgcgcgaccgcgttactgttgtgaactttcatggactggcagcccggttgatcagagcgcacggaaatgttatcggcctaagtgaggaactacgccttccggagaacgactgggttggcgagcaactccgccaacgcaacacctcctggaatgaccgaggagcgatccagaatgcgcttcgtgagacaaagcaacaacctttcagcgacgcagcggtcgaagctgaacttgaacgactcggaaatgtcactgcacttgaactggaacggctcagaaaggaagaaggacgcctcacctatgatgatctgccaagacttgccgagctgattctcggttacgagagcgtcgcggacctctacgcgacacacttcggcgctgtcgtggttgacgaattccaagacctgactccccagcaactccgaatcgtaaacagaatcggttacaagcgcacaacctatggcggtgaccttgtgcaggggatctatggttttgcaggagcgcagccactggcaattgatcgggacatacgtgccgagtgcacctgcgtgatcgagttctctgagtcgcatcgatcctcaccggcagttctcaggacggtcaacgcccttatcccgatcacgtcgggacaggtactcaccgcagccaaccccgactcctggccttcgggcgggctcaccgggacgatcgtgcaccaatcggcggaatcggaagctaagtgtatcgtgaaaattgcgcgagccatcctcggcagggctcccgggcatcggattggagtgttatcccgaacagcgccgcgtcgccgattcgttgacgcagccttcgccgcggcaacagatatacctcactacaggtgggatgacggcgtgttggacacagatactgccaaactcgtaaaggcaatgctcgcgaggtttgatgtcgccgcctacactgccgcgcccgacaaagtaactttccttcggatggcggttgactttgactcgatcactgatgtcgacacgcgcaagagcatggcggatgctctcggttgggtacaagatctgctgtctaaagcggtgaagccagagagcatccgtggacgcatcaaggttggcgattcagcgaccctcatcactagccctggagtccatctactgcgcggacacgtcggcaaagggcaacagttcgactgggtgattgtcgtaggccttgaaaagggctccattccgttcactatggctgacacatcagacgacgagatcgctgaggaagcacgagtgctttccgtgatgatctcacgcgctcggcacggcgtcattcttagccgagccaactcggttcggacgaacggggggcaccccatgagtcgaactccatcccagttcctcgaatggattgccactgccaatccactcgatgcgactgggatcatcgagtggttcaaagctgcggactggcgtgtaatcagtgagagatgaccaacgttctttggagagaagtgcgctgtccttgatgatgatccacctccgacccgcgcaaccttgggcgccggactcaccaggttgcagatcggatcagactggtaagcaagcgcccgtaaacctcgacttccctgaacacgggcccaggtcctattgaccccgttcagagagcacgagttcgtccagtcgcgctgcgcacccgatcccacgtcgtcagaaggtgagcggtagccagccagggtcatttacaaagcgctcagcgcgatctacagtagatagtaaggcaggttctcgtctcttgcgggtccatcgggacggcctacgggcgctcttccacgtactgtttcctcgacggagtagcacgtgtgacgagagagcccgatcatgttccgaaccatctggacgctcagcattcatgtcgatgactgtcttccagcactacatgccgagcaaccggctgctggcagctacgcgaactcggcgaggtgtgaagtggggtgtctcggcaatgctcgtcggcgtcccgtatctcgccatcgccaacgtgttcaactaccctgactgaccgttctgtggtgacgtgcaacggggtatcgatgttggtgtgcgcgaggacgttggttgtgggctcgttgtcgggtgcgtaggcggcgttctcgtcgttgtcaatagtgatgcgggtggatagggcacggttgaggattcgccgctcggctggcacgtacgttctcgactgtggccacggttagggcgaggtgtgctccaacggtgtcaacccctgggccaatgtgttgatgaggtcacggtgacgagtatgtggtcatggccgcacactccagattgatccggcaggcttccagggtggtgaacctcgttgaggggtccagctaagtacctaaggtcatggccaagcacgatcgcattcgctttgccgtgtgctctctttcggatcatcccggggagcacacaagatcgcccgaacaatggcgatcttgtgtacagtgactttgctagagatgttttcccaggaccgacagtgactgccagtgcgatgttcgaggtagtggtgaaactacgggtgtacaagatctgggtggccgtaaacgaggttgcctcttgggctcaggtcctgcctgacggaacccccctatctgagccctggccatgacgggtatgccttagtcaacgtggctgaagtgtcctgatatcgcagcatcagtgactagtttggtaactgtaatgccgccgcacccgttttacttactttcgatagaaagcgggtactctgtgcactttgcagggtttttgccttcgttgcttcccgtgcgacttactgtgtcttcttccttggggaggtgtaggggagggtagaatgttcgtggactagatcaacttaaccaacttacgggttgtaggttaacacctatctgtcaaccttgacactgtaatcccattgttcagcaggcacactgtcatacatctcactatctgtaaatgcagagcctgtggtttcaccaccaaagcctaactgccttaaatgtgcaatcccgttctgtgctccctccaaatcgatccgctccagtgtttcatcagcttcagaagcatagaggaacgtcacgctaacctacgatttggttctgggttgaatttttaggcgatctgatctgaagtttcgcgcgcctgcatagcccgatccgcaatctcgtccagcccgctgattatgtgatgcagctcacaagtagttagtaacaggacctgctccgcggcctggcctctatcggtgatcagcatgtgtccacggcatcttatccaccacgatgtcgcaatagttgcactgattctgacggcaccgccaacattcggtaagtgtaggataggacaagccttgagagtgtggatggaatgtgccaactctctcagtcctcaaagcatcagtggctagatcaacaaacatcgtaaacaggttgttctctcttatagcgatgtgtctatcgaagcagatgaacgagtcatctgccaggtatgaatgattgccatcactagtaacctctgcgtacggcagcaagacgttactgatgtttgagattaggagatccccaaaaatagatactcggagcgaaatagtatctatacctacgatgatgccgtgaacactactggtttctcaagcaaccagatccgcacatttaaaccatgtgaaacgtccggtaaacattctgctgtaagtcacccaggtgaccccttggagaaagttatttcagggctatggggctcgggggtgcgagaggattgttcgttgctcatttcggattatctttcagagatgagcaaccgcaatcggcattgaccagaagcgggtaaccggttgaccctagacagacttatgtttggtattcgtcaagcccccatcgggcgactggaacctgatcaattagatgatttgattgctattcttagaagaatagtttcctagattttatagcacttcccctaaacgtctaagtatgccctaaatcgtagctctaatgcagatgggcgggcgaggacgttccgggaagcatcgtcaagagtgtcgatgtcgcctgctctagctaagactcgctgcctaggaaaatcctgaacccaagtggctcggtatttgggggtgtagttcctggcgctatcggtgatgtccatagcagtcttggcggcggacgtgttcgttaagtcaataggactccagctggttttgtactcgtaatcttcaagatcaacatcgattcttagctcagtattgaggatctcgatcatgaaactcgaatcagagggaaaacttaactatcatatgcaatatcttcttaagaagagcgcttgccgactacgttatcaagcgatcccacgagcaccaatctggtatcggtaaaagtgttcgcttttctcggcggaaaatccccaaaatgcttggatatttttcttgacggatgaacttggagaagcgctgttctaatgcggcgtcacgccagacagtgtgcgcccggcatcgcccaagcctgagtgtccgaaacatgcttgatgcgtgtgaagcgttcctgcgaccaaggctcagcttgctggggatgctctaattacttctgctgctcgatagtatgcgtcctaggatagacgttgacttgagttgaggttgtctggctcttcgggcctgaggtggggcagctagtcggggcccggtgcggtgaggggtcggggttattcggcaggatcagcagcgcccaaactcgctgctccaagaagaccccgactgtgtgtgagcctaccaactactgccctcgttgtgatgccctaacctgcccggtctgtacgtgaccgacgtcgagcgcggacccgatacgattatggtgggggtgaagttagctccgggcgaggggttctgccccgactgcggtgtgctcgcgtctccccatggccgccgccgggtcctgcacgatgtttcttcggcagtatggcggtcgtgatcgggtggtgtacacgcacgtggcgctgcctcgaagccttgtgtagcaagggctctttcacggaacaagatcctgggatcgccgtactgtgggcggtgttgacccgccgtgccactcgatgggccgtggggcagctgcgccgagaacgcgtctcagtgctgggactcgcacgccaagctcagggcgactggaagactgtctggcgggcggtcaacccggtcttagaggaggcggacgctgacccagtccgctttgcggggatgcggcacctgggggggtgagcacgtctggcacgacaagaacccacgaacccggggaccgaagatgctcaccggcatagctgtcttcacgcacaccgacgacgtcccacgggcccggctgttagacctgaccctgggccgctccggaaccgtgtatggcgtctggctccagtaacgcggccaagcggtggcagcaggtcgagatcaccgcgttggacccgtttcgcgattacaagcacgctatcgatgatcacctcgataacgccacagccgtactgagtcccttccacgtcgtgaaacttgccgcccaggccctcgacgaggcccgacgccgggtccaacaagccccctcaggcaaccgcggccggactagcgacccgctctacggcattcagacgatcctgcgagccggggccgagaacctgtccgacaagcaaaaacaccgtcttgccaccgtgatcgacgctaacgaggcacacgagaaaatgttcattacctggcacaagcagcgtaacggctccgggccgtcaacagaccgatcgaactctaccgccgcatcgcccgtggctccagcaactgcgacaactaccgcctactccgctgctcatcgccgggggcaacacacacgaaccaccgccaagtcagacgagccatttatagcccaacagctatttgggtgatctcctcagcctgacagcgccagacgtcggtccgccatgctaagctgaacgcgtcgcttaagcttcgggaatagaaatgggaaacggtatgactcaaatacttattcaaatactcccggaatagacattcttgcggcgcgctccgctctaatcatttcgtggccgcctctcctacgacgaattgtgcattagggaagtacagtgcatctcagtccatatgtagtctttcgcaggacacgactcgcctactctcaacttcagagcagctccttcgacgcactctggcagcaagtgcaagaaatggtcgataagcatgcgcaattagaggttcagaccagcaggcttacggcacacctggagtctgttatttcagtaactgcgcctcgtgacagatctcgactaatcacattaaaacgtgacgtgcataacatgcgcgtggaaaaagtgaagcaaagactactgcactgtcagggctgcacggctagcaacattatggagcctgtatctagttggatcgatacatgtcgatcatacgaaatacttgagcgtcggttgagtcaagtatatgcggacagccgagacgaagtgtctcgtcactacaggtccctctaccaggctgacgcaatagagccaagcattcaactctcaggtggccagctccacagtgacctgacgcgtctgattagccacggttctaggataaaacccactaaagagcggactctggaaacgactcttgtaaactatctctacagggcagcaacaaagccatcacctttcggtcgtttcgtggaagtaggggccttcgacccgtctcaaccaaattccgaacctcgacgctgcagtgaatccagcgtgacgacaaaccggattcttaccagctggctcactgcagtaacagcgcgttctttcgccgcaccagaaatgcttgctatcctcaacagcaccctgcgcgttaaacgcgatataatccagttcattggaattccacctggggagtggcgaggtgcaccgagcattcccgaggagcgcctgctaactatccgcaagcgcgaagatatgatgtctgttcttaagctcctaatgggcggcccaagatcagtcggtgacctcattattgcccttaatgaccaaggcatagatgaatcacacgcaactaatcttctcagcagtttgagtacagcagggataatcttctttcggctcccagtagatgaccatgacgtacactatgtacagactgcgtgtacagcgctaaggttaaccaaagatgagtcacttcgtgccgctttccaaagtctggcgaacgctgaaaaggagttccccacagcgtcagtcgccacgcgtcacgaccttctcctcagcatcaaggattccgtgaatactgtcgcgtcggcacatgatgtgccggccccaccggacagcgtactcaagagccctttgtatgaggacctccccgccaccgcggcaccccagacatgggattcgaacacggttgagagatcagcccgcgcactcaggagcatctggctactgggcgatttaatggatagctctcaacgccgacagttgggcctctcccagttcatagcagacatgaataatggcgcgccagttacttttctggatttcttcgactcgttttcgcgccttagcattcgtgagcgccaaggaatcctgcgcggagaaaactcaccgcaaatcgcccgtttcgctcagcaatatagtgaagcattgcttaaaattcgcgatgccgttaactacacgcaggacgaagcccaccttgaatctcaggtaattctcgatgcgatcaccaatattgatgatttccgaccgactaagtcggtcacaattcgaggacaattcacaacatcgctcacctcccatataagccaactgataatcaacggtgttatgacgggatacggtacatacatgtcccgattcgcaacatttgtaaacccatcaggtacttggagtctagtcgacgggattcggagacatctatccgatcattttccaggtcaatgtgatttgaattccgtactgggattcaacttcaatgttcatccgcaaatgacagcacatagtatcgcctatcctggagtagttcctgtgcttaatggtgccaagacacattcgattcaggatttaatactgattccaactgctgaagcaggtccgcgccgcgtcgctatctttgatagagcagagaacgaacttatcgacctccagcccatgaatttcatggttccttttggggtgcctttgctgtatcggactctagagttcctgtgcccatcgaccagatacctatggaacccagctcaagaccttctggatatcccaatgatagagaacagttgccctcggatttactttgacgacgtagtggctcaacgccgttcctggacgtgcagcgccgagacgctcccgtgtcccccagagaaactctttaggggtgatcttgctgctttgcaagccttcgactcgtggagactatcagcgagggtacccagacatgtctttgccctagtacaaacggctacggaaagacaaattttttccggagcggccgacgcgccaaccttgctctccgaatacaagcatcttcggagagcaagtgtgcataagccaatctacctggatctacgaaacccacttctagtccgttctctcgcgaaggtgatcatgtccaggcccgaactatatgtcacgttttccgagttcctcccatcggaggccgattacacgcagaacggaagctgccccagttacgcagaggagtacttcattgaactgtgtgccgagtgacagcgcaagcatgtctgatcctggcggctggcgggcgctccatattcacttgcctccctcggtgcagtccgagtacctagctgacgtgattcttccctcgatgtcagccttgatgccagaacatgactacttcttcctccgatattggcaggggggatcacatctccggcttcggctccgtagcactcccgagcgccccctagatgatgaggctatcaacgaggttgcatgccatctccgtagccttctcccggcgttgtcagaccaaaagcgcgcggagtaccgctattcgcaatcgcttcaggatcagttagccgaaatggaaagggctgattgccttcccctagaggcggttgggaccgtggtagagcgccggtaccagcctgaatatagaaagtatggcggatcggtcggagtatccattgcagaggatgttttctgtagtactagccgatctgtccttcgcattctaagtgagcgaccaactagccaccgacagcccttggggtatgcttgccaagttttcatccagatgctgggctgcttagggctcgcaacttcgcaggttgaccagttcctcaccagatatgcgcagtggtggaccccttactcaatggccgctcgccctgagatcttagcggcgcgtctctacgccaacttgtcaagcgtggtggcggacctatgggccgcaagtgagcccaacggaatgttctcggttccggctctcaatgcttatacccaatggtcacggcgacggtcgtccgcgagaaataccagcgtaaagatagacccaatgtttctatcttgcttagcgaactacattcacacaaccaataaccgacttgggctcccacccgccctagaatcgacagcggcatatcttgtccaacttggattccgatcggtggctgtcaggggggagaaagtgcgatgaatccaaaaaactccaaagtgacggaactttggtttccagataattcagactcgccatgtactcttcttctcgacttatctcgggcctccgctgagggcactgagcctagtcctcaatactactgtcgaacttgggacccaacaacaaaagatcccggagtaagggttggcatacttgatcccaaccgcttaactcatcaaacggctttccttggcggttccggtattacgcatcacttcttggtaatggaaaaaccacccagctggcctcttctatggaacgcgggtttcgcgggcttgaagctttccacgataagcaaacaattgttcaccgcgtcatatccatggatggtaaagtgggcgctacaggcatcggcttggacggacgacgaacgccttctggctcttacgaaacttctagttgcccacgctgatgcaagccttccaccggtcgataagactgaaatgctcggccgcctccctttgaagttgagcttgcgactgatcacatatcgttcccactacgaaagcatccgcgctcgcacgattgacccgaaagcgatggatactgcggttaatcgggccttcatgaagtatcaagacgagctcctgcgatggtcccagtcgttgacatgctcgtcgagctatcgtgagaaagaatggagtaatcccaacctttcagaatggagcgccatcatttattgccatctcccacaaattaggcaactcctcagcgggggaggattaactgtcgcgggcccgacacgcgaggatatagaagcctccttaggtcacagtattcctgatacacgatttcacgagcgtcttgaccccgccatgcagtattatctcaatcatgaccaagacttcacggcatacagattctgcacgggttttttgtacagcaacctgtactcgctaggaataccgttgaggctgcgctaccttgtctgtgggttggcagcacgtttcaacgaggagctgtcggacacgacttggcgcgatttacgggatctcttccacgaggctgctactgttgcatattacacacgcgacacagacgggagcgggattagataatgacagttgagcgtcagcctctgcgggagcgtgcaaggagcctcgtttcaccatacggactagtttcccaagtacaccctctgcacgccaatgaagcagatccaccgtttcatgtgcatttgggtcgaacaggccactcaatacacgaggggcaaattacttttgagggagatatcggaaacaccgacggggcagggtcgggatccgacagtaccacggcagaatttattgcagtaatggagtccttagagcgctactccagcgcaatgtgggacgctcgttcctttttgctggaatcggaaaataatctgcaggagcgacttgtatctcccaaccaattcccacgctgttctacagccgagctagattctggacatgtactcaggcggtacgacccgggcgtcccaatacgatgggtcagaggatggtcactgacttcaggtcatcaggtgtgggttccggcgatcgcggtttatctgcatctgccgtacttaaacgactctgaacgattcatacgttcagtctcgaccggatgtgcggttcatgaatccatgcggaaggctgttcttaacggtcttttagaagtcgtcgagcgagatgctattgctttgacttggttgcatgagttgcccttgcccagaatcgcggctagcgaggccggtgagttcccgccggaagcgctagccagttggaagtcatatagggattacggaatcgagacccatctctttgacgcaacgacggattttgggattccggtgatctttgcgctccagatatcggatcaggatgacgacatcgctcagctcgtaggcgctgcatccgctttggaacccgctgaggcgctgactaaagtattcagggaaatggcatcgatccgaatagcactacgcgcctttctcgcccagtccacatcgattaagatttaccccgatgtggctaacgtgacagggggtgccgccctcatgggccagcgcgcgtaccgagatgcattttccttcctccttaacagcgagcgcgaaacgtcaccgtcgcggatgcctaacctcctagagctgaatgatgatccactgcgcgagatgattattcgaatacgcctggctggcgctgaagttatcgccgtcgatatcacgacggacaaagcgaggtcagttggtgcaagagtagtgaaggttttggtcccagaggcggttccactctcctttgttcaccgagagaggtatttagatactcctcggctcatatccgcgcctaatagcatgggatatttggttgacacagcgcctacgttcaaccggaacattcaaccttttgcgtgaaactcatatcaaggaaggccagaccgactaatggaccgcttcgttgtgactcggacgctcttcggcgtggagctcgctaaagaactccagtcctccatcttagaggatgggccatacataggcgactcagttcctcactggaaacaaaatcaattactcgtgtacgtgacgacagatgaggcatccccaaggttggactcaattgacggcggggcgttctcagctggccggccttggctccccgtccgtcttcgacccacagtgattcactgcggccccataatttggccaggtagtacgccttgcttccggtgcagtgtgaaccgaatgaagcagcactctcccatgcctagtctcgtaggttcaggaccggagcttgtggaaggctatgcggcgtttcatgtcagacttatagcggcagcgatctcgttgctggaggagagattctctgagggggagatcttaggtaggggcttatcatttaatcttgtcaacgggtttcttaaccactatcctatcgtgcccgttgatcgctgtccgagatgcggtggccgtttcggtaaacgggaagatgagcaccaagagttgggctgcgtcgcacgggaggtgtgtcaagtatgaagggtataatcagtggtgaacaggtgggaaatgcagctcgctttgacaagcagttcagggtccctcgtcggccgagcaggcggctcggtgtcgatattgagatccgtgaggatgcaacaattctttggggatcagatcgtctgcagacatttacaggaggaatgaaaccttcactgattgaggatattttacgagcgtgcgacggaactaagacggcacgtgagctcgcctctgtatgtgatgttacggagcccttgatggacaagatagtggcccttctctgggtctcgggtgctattgaggaggcgggcccgaccgatgttgaaagttctccgcttggggtccttttgtctcgccttgggaacgcaactggggcgaatgctagctggcaggaagctcagcacagaattaacagcatgccgatctgtgttatgccccattcggaacttggaacggaggttgcgggcgcgcttgctggcacctttgaggttatcaatgaagaggcagcttttgaacgcggcgtggttctattcatctttatcgaaaccgcgtcgtctaagatcgaacagcatcacaaatttgatgaactgacaaagagaagagtgctattggttagcgctgcgggtgacgaagttgtagtggggccgctttatgaccaggctataacgccctgccttcggtgctgttcgtcatcgaggatcaagctggatcggggtgcctcgagcccggcgcagcttcgtctcatggctggaattgtctcgcatcatattgttgcgttggtaagcagggcgttactctcaccgctgcccacggattccttggcgctgaatgtggtcactggtgtccagcgctactctcccccggtgtccagaccgggttgccccgaatgttcgcatgcgatcccagctattgctagtgagccgacggtcggtgccgtgtacgaggcttccgtagcactccctccgcgagaattcgtgaatgtaagggactatcaagcccacttcttgagcgcaaatcaacaacttcaaacgaaatttaagtcatggggaaaaagggaaaaattccctttgcctgacattaatatttcagacctacatatacagattgacgaccttctttttttagctgctgcccttaggtttgggttcggaatagacccggagcggaccacttcaaaaatagcgaagcgctggacggcctctggtggaaacattggctcggtaaacgcattcgtgagccttcctgcgatggtagggcacattcccagtgggatttatggatattcagttagcgatcattccctagccaaagttagtcaggagttgatttcggcgactgacatcatgatcgcggcttctgccgacctacggaagatcgcttctaaatatgggacattcggcttgaggatcgcgattatggacgccgggtgtgccctttcaacggtgcgtcgtgtctgccgggaagtaggccgtacattttcgatgtggagcgctgacctcgacgctgggtctattagcgagatgctgcatctttcaagtgcgcgtgagcctattattggagtttcagtgctgggaaaggggcaacgagggtgaggacagacattcccgtaatgaatgccattctgtgtggaatttctggtttgaggccgagagttgcggagctccggctgaatcatgtaccaggagaacttgaaggtgacctgatcggcgagttctcggggccagttactccggatgaaggatcaccttgtctgccgtgcaagagcttccccgaattcttgcagacaaggaggtcggtatcccattttagagacgaggcggttgacgcacgctgcgtcatccatgcagtggctcaggctcttgaggatgatgagcgactgtgggggtgctcagagaccgctggtcttcttgaggcgtttgtctttgtgcttcgagatagtgttggcggtcctggaccggggatctatcaggtgcggcgcgattctgcggtgagaatgacaactgccgctgaacttggcgatccgattcgattcggtgttcaggaggaattcttcgcagggtcaggggtagttatcttttgcgcgaatctggacgtggaggatggcgccggaggagcaaacggatacttagttaatactctccgagcttccatggcactctacgaagtccatgttgaactcggttgcatggacgtggttggctccgttttcggaggcttcattccagcttcgctgcgatcgctcctgttggcagatatggttactcgtcagcaaatcatctcttgctcctatggttttccagcctaacttgctcgacccgccagtagctgggttgtgaattgggtaatgaatggatcgaaataatttgtaccatctgagtcgcgagaaggtaaatacaaatgaaaatgaggcacttaatctcaatgtgatggagttctcggacatgattagcgacgctactgagcgcgacgacgtcactcagataatggcggcatcttgcgtcgagacgagtgtatcgtcgagttccacgtcatcttcatgatcgccaagtggcagattatggagccaggagaagaggtccgtacagggcgaatactcagacgcgacttagccttcgcagttgtcgtggaagtttatctagccgtcttaggttgtttcagcaaccctacacgggaagatactcttagcgctctggggtgggattatttggttcgccaaagcgattcaaggcttcctctctaggcggttatgattagtgtcgaaaccaattgaggggaggtgaacagaatggagaacgaaacgttggaccttgacgtgatggagctggccgatatcatcggtagtgcttctgatcaagacgacatggctcaggtcatggctgcgtcgtgcaccaccacgagtgtctcgacgagctcttcgtcgtcctcgtaacgagatgggcgggctggcgggtgcttttcgggcccgccggcccgttcctttgttatttacggttctttgcttgagcgggctgaatcgtggtggggaggttgtctaaaatttgggctcgggctcgaggccggccgcgtaaattgaccacaatgagcgtgctgcggtaacttagacgtaagatacgcttctcctgctagccttatttgttacccgtttggatttcacctagatgcacgctagggtaggctgattagcttttatggaaatgatattattattatgataattagtgtagatgggatttggaggggcatcgtgtagctagtctcaaatagaagcgatcccgcagtgcagcgtattttggatatgtccaggccttcgttcaagctggtttgatgtttttaaaggatgtggtgaccgttcacattgcgcatggctgccggtgtgcacattgttgagatgtattcggaggctggaaaggcagcggctttttcaattgacgcgtatgcaaccctgggggttccatatcgagaaatgtcatcattgttgttgtcgtaagtattcaaggtgggtaagcgccctgagattttcgctgttgatcgggtggcgcatgaggctaatgccggcgtaattgatccgaagctagatttggttgttttgaacagtttgcacaccgtcggtaatatgggggcgataatttagacctcctttgtgcttggctcaagggcttttgttctagtggacagaaacttgagctctatttccgataggagggttcttctggcttctcctagatacgtctttcttcttctggttctgagagctagtcgcgatgagcttcttgagttgtgcaccagtcgtcgggaactggtgaaattcttggcggatggctatgtggatatggcctttttctggtcttgagaccatccgatcacgatggtctagggaagcaaggataagggtgtgtcgataatttgattatcggatttccatctccgttagaattctgatgctggcggatgctaagtcattgaatgatgtgtctgtggcggtcggaattggactacatgagaggccgcagcgtgacttggagagcggatcttaggaatcagttcagggccaggactcccatccaggccatcagtttgttggcgaagctgacgatcagctgcccgatccagttctgtgtgaagccttttcaacgacagatcggtcaggctggtgtccttcgctgtcagggtcaggtctaacagccgggcccgtgggacgtcgtcggtgtgcgtgaagacagctatgccggtgagcatcttcggtccccgggttcgtgggttcttgtcgtgccagacgtgctcacccccccaggtgccgcatccccgcaaagcggactgggtcagcgtccgcctcctctaagaccgggttgaccgcccgccagacagtcttccagtcgccctgagcttggcgtgcgagtcccagcactgagacgcgttctcggcgcagctgccccacggcccatcgagtggcacggcgggtcaacaccgcccacagtacggcgatcccaggatcttgttccgtgaaagagcccttgctacacaaggcttcgaggcagcgccacgtgcgtgtacaccacccgatcacgaccgccatactgccgaagaaacatcgtgcaggacccggcggcggccatggggagacgcgagcacaccgcagtcggggcagaacccctcgcccggagctaacttcacccccaccataatcgtatcgggtccgcgctcgacgtcggtcacgtacagaccgggcaggttagggcatcacaacgagggcagtagttggtaggctcacacacagtcggggtcttcttggagcagcgagtttgggcgctgctgatcctgccgaataaccccgacccctcaccgcaccgggccccgactagctgccccacctcaggcccgaagagccagacaactcttgttgagcttcaaagccatgaaatcttcggtctgcttcttaatgccagtctctgccgggaatcgctcgatggaagatgcgccgtagaagcctacgatgccatcggtgtgatcgagaatgtattgcgcatcctcgggattggcgatggggccgccatggcataggcataggatgtcgggattgacggatttggcggcgtcggcgagttcctgaaccttgacagcagcatcctcgatagtgagtgctgtttttgcaccaatggttccggaggttgtcagacccatgtgggggacgaggatgtcagagcccgcccgggccatatccttggcctggtcaacgtcgaaaacatagggtgaggtgaggagatcaagatcgtgggcaattttgatcatgtcgatctccaaaccgtaccccatgccagtttcctcgaggtttgcgcggaatgtgccatcgatgagaccaacagtagggaaattctgcactccggcgaaccccgcggctttgatctgggttaggactggggcatcactctgaagggatcagtgccattaactccggcaagaactggggtgtgcttgacgacgggcagtacctcgcgcgccatgtccatggcgatctcattggcatcgccgtaagcgagaagccctgagagggagccgcgacctgccatccggaaacgtcctgagttatagatgacgagcagatcgataccgccggcttccgcggatttaaccgtaatcccggtgcctgcgccgccgcccaccaaggggattccgttggcgacttgtccgcggaactttttcaggatttcagtgcgggtcatgatgctattcctttccgattagttatggatgatgagctcgtgaagagcccgcgccattgcttcgccaaaaccagaatcattgatattttgttttcgctcagtcacagtgatgtcggtatcctttattccctctcgaatggcgttgaacaaagcgtcatcggcttctggatcatagaaatcttcacctggggtatctattcctgcgacccccagagtaggaatgaaagcttgagccgggccgcgcgcagcggccgcctttatggcgattctgtgaccaagctcggccatttcggtgttgctcgtttgagcgtcaccgctggattgtggatatgcaacgtgcgagaggaatagcgctccggaatagtgtcgacagggccgaaattgaccatgtcaagcgcgccaagactgatgacttcgggtattccaaggtctgctgcggcttccatccggcggggtcctgccgagagaactcctccgcagaggtcgtcggcaagctcggtagtcgtcaggtcacatattcccgcgagtagcccagacgatgcgagcttttctatcgccttcccctcccggaatcagttgcgtggaagacgaggacctcgtacccaaggtctgtcaaggtcttgcgagcttcgtcagcagccggcgttgtcaatccgaacatcgtcaggccgacgaccggtttgttgtgagcggggttgctgacggttctaacgtcttcatactccttggccatggctgtgatagcggcggctgcattggcgaagaccatgagcgacacggaattgatgccggccacgtcaacgacggagtacataagtgtgacgtcggtttgtcccacgtaggggctgacatctccggaagccatcgtggaaaccaggagcttggggaatccaatcggcaatgtctgcatgaccgaagccgctacggatgatccacctgatccgccgagggacaggagaccgtggattttcccctcttcggcaagcttggatgcaataatcgaagcgccacggcccatgacatccatcatttcgccacggttatgacgtgttcggatgtcacttggcgactcgcctgcggcacgaatgacctcatcggacgtgtagtcggctatacggctgttggagaatgagccaacatcgatgatgactacctggctgccgttggtaagaatgcggtgacgaagccagtcgaactcgtctcccttggtatccaaagttccgagcaaagctattgcggccatgaacactccttcgtgatcgtgtcatcatgaccgtagttcggtgattctgcctacaccatgccgtttgagacgaattggcctgtacgttgtatcgctggttgtgaagaagggcaatacttcaggtgtggttgtcaaggttgaccctgcaagtctgagccggatgctgggggagtggagccagcccggagaagcgcttccggaagcgttggcggacgcattgctggatctcattgacgctggttttgtgcccgctggtgcggttcttccaccccaacgagcatgcgccgcgacactgcaagtatctcggcaaaccgtggcggaggcatttgggattcttgaagccgcaggccacattgcggcgttggttgggtcagggacgcgggttagatcaggccgcgctgcagtgagtactgatggcaggttgttctcgttcagcgaggctgcacctggcctgatcgacctgtcaacgggggcgctacctgcgtcagaggtggtgcgaagagtgcggctagaagaccacgtcgacttggatgagtatttcgataccgacggatatttcccggctggactacctatattgcgtgcagccatcgcggaacggctcactcgagatggagttcccacagtcccgcagcagatcgttgttaccaacggcgctcagcatgcgagttatcttgcctctcagctcctggtctcggctggtgacaccgtgttggtggaggagccgacatatcggggtgagctcgcagagctgcgactgatgggcgcccgtgtgaagagtgtccc

SEQ ID NO: 56 - DNA, 26003 bp, Propionibacterium acnes
cccgctcactgccaacgagacatcacgcagcagcggccgaccatcggccagcgtgtacgtcaccgacgcgacatcgagacgaaccatgacccaaaagtatcacacgtgtgataaatggaggttgagtatggcggcctgttcacttgatcaggcatttcttttagtgaggcctggggcgtaaccacttgtctgcaccttagagctgccacgcctcttgcagatcgaggcagaggaggctgcgcgggggtcgtggcgtgcggtggcggggtttgatgtcacgttcagtgtgccgaagtcggcatcggtgttgtgggcggttgcggacgcggggacgcaggcgttgattgcgcaggcccatcatgagacggttgtggcggtggttgcattcatggagtgcgaggttgcagccatccgcacgggtgcaactgctggggatggcgcggttgcacaggtcgacgtgacgggtttgatcacttcgattcccgcgccggggacccgcacttgcatacgcatgtggtgatcagcaacaaggcccgcacggtcctggatgggaagtggcggagtttggatgggcgttcgatgcatgccgcggtcttggcgctgtcggagctgcacgaggccgtgttcgccgatcacatgacccgcacgttcggtgtgacgtaggagccgcgggagatgggccaggaccggaacccgtcgtgggcgatcaccgacgtccccgaacagctggtggcagagttctcgacccgcgcccggcacatcaacgaggcgaccgacgcgctggttgctgactacgtggcccagcacgggaagcgcccttcgccggcgaccatcatgaaactgcgcgcccaggccacgctcgcgacccgtccggagaagcaggtccgctcacttgcggagctaacagccgagtggcgcactcgtgtcagccagcagctcggtgtggatgccaccgtgtgggcgcggaccgtcacgggtggggagcggcagttgctgttgcgggctggtgatgtgccgttggatctgatcgaggggtggggcggtctgtagtcgagatggtcggtgagaagcgttcgacgtggcggtgctggaacctgatggccgaagtcgcctgccagactgtggggtggcgtttcgccaccgttgaggaccgcgaagtcatcaccgcgatggttgccgacgcagcggaacaggcgtccttacgcctgaccccacccgagctagcgaccagcccggcgaagttccgccgcccggacggcactagcgtatttcgtccgaagcactccacggtgttctcctccgacagcctcctggccgcagaggaccacctcctgcaacgggcccgcaccgcgaccggtccgactatcgacctgaccaccgtggggaccatcacgagcaaggcggacagcgagggtcgggtgctcggtcccgatcaggccgcagctttggcgtcggtcgcggtcccgggccgggtggtggatgtgttggtggggccggcgggggctgggaagactgcagcgatgaacgcaccgcgccgggcgtgggagacggagcatggtgccgggtcggtggtggggttggctccgtcggcggtggcggcccaggtgctggccgatgatctgaggattgccacggagaacacggcgaagtggtggaccacccaccaacacaccggcgtcactttcaaggctggtcagctggtcatcatcgacgaagcttccctcgctgagaccctctctttgaatcggatcacgctggctgctgaggaggcggggacgaaggtgctgctggttggcgactatgcccagctcccgtccgtcgatgccggtggtgcgttcagcctgttgatccacgaccgccacgatgcccccgagctggtcgatgtccaccgcttcacccacgcctgggagaagaccgcatccctggagctgcggcacggccgcaccccggtcatcgacacctacctggcacaggatcgcatccacgacggagacgccgaggccgtgaccgctgccgcttacaccgcctggcgccacgaccggcagcaggggttggcgtcagtactgatcgccgaaacccgcgagaacgtcaccgccctcaacatccacacccgcgctgacctcatcctggacagcacgttgaagcctggccccgaaatcaccctgtccgacgggtccatggcaggcgtgggtgacacgatcatcacccgccgtaacgaccggcggctgcggaaccggcacggctgggtccacaacggccaaacctggaccatcactgccgtgcgtgacgatgggtcggtcacgatccgcccacccagtgcccggttcggcaacagcatcgtcctacccgccgactacgtggctgagcacgtcgacctcggctacgccgtcaccgctcaccgcgcccaaagcatcacaccgacaccgcccacgtcctcgtcgaacccacggcgacgcgggaaacctgtatgtggctatgacgcgcgggcgcgaatcgaaccgggcctacgtcatcctcgaccgtgccgacgaccacgccgccggcgccgtgtgccgtgtgaactcggtcgacagccccggacgctgggtcgcgcggtccgtgatgagttcgtcgacgtcggcagcggaggtaaccaggcgtgcgtggccggtacggagcagctcgtgcgcaccacggctggtgacaggccccggcaccgcaccgacctggcgtccgagctggtgggcctcggacgctacccgaagcgcccccgatcgcgcgccggcctcaacgaccaccgttgctgctgacattgcctccaagcagtcgggagcgggctaggagccgatgccgcgtcgacacggatccgggaggaagctcgctggtcagcgcactcacatcacccacccggtccagcaagtcacggtggccgctcgggtcggggcggttcacgccaccgccaacaccgcacggtgcacagcagcctcgacaccattaagcgtcaccagccaccagtacacgctcacggttcgcgaggtcgccagccagctcggcggcgacatgctccccatacgcggaagccgcccgagaacccgtgaccgtcaccagatcgttccacggtcgcgccaagaacgacgccgcgccccgcacgaacagaataaacggagcgcggtcgcccagatcatccagcgcctgtggccagtgcgcgtcacccggaatcagagtggcgatcccgctctcctcgaccatgcgcagccgctgggcgagcccatccagcctgcccggtgaggtgaggtggtcacgccacacctgaccatcaactcgactcagaccaggcacggtggtcgtgtcggtgtcaagcagcccgagcgtctcaacggcacccaggcggcgcatcagcccgcccgtgacgggatcatcaggctccgccaacagcgccagcaccacccgggcacgacgttcatcaacaccaagcccagcaacaccagacatgacggctcctcctcgaacagacttcgccgaacaggtgcgccaacgcagcccgcaggtgtcgcgacgtcctcagcccgtggaggctggcgaacgcggtaacattcgacagtcgcacggttcggcagctcgacacagcagcgtgctggtgttgctttggaggagtccacgggcctcgccccccacaacggtgacttcaatcgacattgtcgttgttggtgatcgaggtgtcaccgcagctgcgaacgatagtcttgatctggacaacgatttcgatgcggaggaaagcacatgaggctcacacgcttcaaggtcgagaaccataggcggttggccgacctcgacattgaggtgcgcgaccaccttgtgctggttggagccaacgacgttgggaagtcctcgctgctccggtgcctcgatttgctgctcggggcgagtacggcgcagctctactcccgtatttcggccgacgatttccgagcccccgaccaaccgttcgtgattgaagggactctcgcggacttcaccgatgtcgacaaggctctgtttcccgatgagatccacgtcgacccgaacacgaatccttcgcgtctggtgattaggctcacggcgactgtggatgagaacgagacggtggtgatcagtcgttcggcccccgagggcggaacaggacgccagctctcacgggatcaggtgcttggcctgggatggaagttcctcagcgcaaccgcccagacccgcgaccttcgggaagaccgaaagtcggcactcgacgacatccttcaagctgtcgacttgggtgaagaggaggccgcgttcgaagccatcgcaaagagcctgacgaccaccttgggtagctctaaggtgcttgaaggcctccgaggttcacttgctgaccagctgtcgaaggctctgccggacaaggtggcacaggatgacttggcgttcgtgcctggagctgctgccgacaatgacgtcctcagcgacgtgcggctgcaagtcagcaagcaaggcgtggcacccgatctttccgaacagtcagacggcacgcgagcgctctacgcgatcgccctctacgatctgatgagcgtcggcgctaacatggtggggattgacgagcccgagatccatctacacccgagcagtcagcgaagcctcgcgcgcctcctgcggtcgaacgccaaccagaaggtcatcgctacgcattctgccgacatcgtaggagccttcgatccagattctattgtcgttgtgcggggcggaggcgaagccgttcaacccaaggctggattcctgtcggacgatgagcgaatggcagtacgcctgtgggtgagggatcggctcgaaccactcactgcacgtcgtgtcgttgtcgtggaaggcatctcagatcggatcatcctggagcacctggccgacctcaccgaccgaaatctcgaccggctcggcgtgtccttgattgaggctggcgggtgtggcgacatggggccgctcgacaagctctttggtgccaatggcttccgtgtatccatgtcgcaactcatcgatgcagatgcagaagaggcattggcaaagaaactgggagtcgaagttgctgaccttgcaggccgatccgtctgggtctcgcgaagcgacctcgaagacgagtacgttcgtgcgctcggctcggacgccgtgtggacagcactccagtcaaatggccacttctcgaagaatgaacttggcaactgcgcagcaagtgggccggctggcacgcgtaccgagatagatgttgctgccttctgtcgacgaaaggcgtacaaagtaaatgccgcgctatcagtcctgccgctcttcacggcggcgaatgccacgcaggtgtcgtctatcgagagtctactcgaagagatcgtggcgtagatggtcagcccgactcagaagcagattgacattagggacacgcgggttctcgatcttcttgtcgttgctcctgcgggatgcggcaagacggaagcgcttgcattacgaatccaaggacttcttcaccgcggcgatgtgactgccccaaagaagatcttggtgacaacattctcgaaccgagcccgcgacaacatcagagaacgattggggtcctacctgacgccttcggtaatgcgcgaccgcgttactgttgtgaactttcatggactggcagcccggttgatcagagcgcacggaaatgttatcggcctaagtgaggaactacgccttccggagaacgactgggttggcgagcaactccgccaacgcaacacctcctggaatgaccgaggagcgatccagaatgcgcttcgtgagacaaagcaacaacctttcagcgacgcagcggtcgaagctgaacttgaacgactcggaaatgtcactgcacttgaactggaacggctcagaaaggaagaaggacgcctcacctatgatgatctgccaagacttgccgagctgattctcggttacgagagcgtcgcggacctctacgcgacacacttcggcgctgtcgtggttgacgaattccaagacctgactccccagcaactccgaatcgtaaacagaatcggttacaagcgcacaacctatggcggtgaccttgtgcaggggatctatggttttgcaggagcgcagccactggcaattgatcgggacatacgtgccgagtgcacctgcgtgatcgagttctctgagtcgcatcgatcctcaccggcagttctcaggacggtcaacgcccttatcccgatcacgtcgggacaggtactcaccgcagccaaccccgactcctggccttcgggcgggctcaccgggacgatcgtgcaccaatcggcggaatcggaagctaagtgtatcgtgaaaattgcgcgagccatcctcggcagggctcccgggcatcggattggagtgttatcccgaacagcgccgcgtcgccgattcgttgacgcagccttcgccgcggcaacagatatacctcactacaggtgggatgacggcgtgttggacacagatactgccaaactcgtaaaggcaatgctcgcgaggtttgatgtcgccgcctacactgccgcgcccgacaaagtaactttccttcggatggcggttgactttgactcgatcactgatgtcgacacgcgcaagagcatggcggatgctctcggttgggtacaagatctgctgtctaaagcggtgaagccagagagcatccgtggacgcatcaaggttggcgattcagcgaccctcatcactagccctggagtccatctactgcgcggacacgtcggcaaagggcaacagttcgactgggtgattgtcgtaggccttgaaaagggctccattccgttcactatggctgacacatcagacgacgagatcgctgaggaagcacgagtgctttccgtgatgatctcacgcgctcggcacggcgtcattcttagccgagccaactcggttcggacgaacggggggcaccccatgagtcgaactccatcccagttcctcgaatggattgccactgccaatccactcgatgcgactgggatcatcgagtggttcaaagctgcggactggcgtgtaatcagtgagagatgaccaacgttctttggagagaagtgcgctgtccttgatgatgatccacctccgacccgcgcaaccttgggcgccggactcaccaggttgcagatcggatcagactggtaagcaagcgcccgtaaacctcgacttccctgaacacgggcccaggtcctattgaccccgttcagagagcacgagttcgtccagtcgcgctgcgcacccgatcccacgtcgtcagaaggtgagcggtagccagccagggtcatttacaaagcgctcagcgcgatctacagtagatagtaaggcaggttctcgtctcttgcgggtccatcgggacggcctacgggcgctcttccacgtactgtttcctcgacggagtagcacgtgtgacgagagagcccgatcatgttccgaaccatctggacgctcagcattcatgtcgatgactgtcttccagcactacatgccgagcaaccggctgctggcagctacgcgaactcggcgaggtgtgaagtggggtgtctcggcaatgctcgtcggcgtcccgtatctcgccatcgccaacgtgttcaactaccctgactgaccgttctgtggtgacgtgcaacggggtatcgatgttggtgtgcgcgaggacgttggttgtgggctcgttgtcgggtgcgtaggcggcgttctcgtcgttgtcaatagtgatgcgggtggatagggcacggttgaggattcgccgctcggctggcacgtacgttctcgactgtggccacggttagggcgaggtgtgctccaacggtgtcaacccctgggccaatgtgttgatgaggtcacggtgacgagtatgtggtcatggccgcacactccagattgatccggcaggcttccagggtggtgaacctcgttgaggggtccagctaagtacctaaggtcatggccaagcacgatcgcattcgctttgccgtgtgctctctttcggatcatcccggggagcacacaagatcgcccgaacaatggcgatcttgtgtacagtgactttgctagagatgttttcccaggaccgacagtgactgccagtgcgatgttcgaggtagtggtgaaactacgggtgtacaagatctgggtggccgtaaacgaggttgcctcttgggctcaggtcctgcctgacggaacccccctatctgagccctggccatgacgggtatgccttagtcaacgtggctgaagtgtcctgatatcgcagcatcagtgactagtttggtaactgtaatgccgccgcacccgttttacttactttcgatagaaagcgggtactctgtgcactttgcagggtttttgccttcgttgcttcccgtgcgacttactgtgtcttcttccttggggaggtgtaggggagggtagaatgttcgtggactagatcaacttaaccaacttacgggttgtaggttaacacctatctgtcaaccttgacactgtaatcccattgttcagcaggcacactgtcatacatctcactatctgtaaatgcagagcctgtggtttcaccaccaaagcctaactgccttaaatgtgcaatcccgttctgtgctccctccaaatcgatccgctccagtgtttcatcagcttcagaagcatagaggaacgtcacgctaacctacgatttggttctgggttgaatttttaggcgatctgatctgaagtttcgcgcgcctgcatagcccgatccgcaatctcgtccagcccgctgattatgtgatgcagctcacaagtagttagtaacaggacctgctccgcggcctggcctctatcggtgatcagcatgtgtccacggcatcttatccaccacgatgtcgcaatagttgcactgattctgacggcaccgccaacattcggtaagtgtaggataggacaagccttgagagtgtggatggaatgtgccaactctctcagtcctcaaagcatcagtggctagatcaacaaacatcgtaaacaggttgttctctcttatagcgatgtgtctatcgaagcagatgaacgagtcatctgccaggtatgaatgattgccatcactagtaacctctgcgtacggcagcaagacgttactgatgtttgagattaggagatccccaaaaatagatactcggagcgaaatagtatctatacctacgatgatgccgtgaacactactggtttctcaagcaaccagatccgcacatttaaaccatgtgaaacgtccggtaaacattctgctgtaagtcacccaggtgaccccttggagaaagttatttcagggctatggggctcgggggtgcgagaggattgttcgttgctcatttcggattatctttcagagatgagcaaccgcaatcggcattgaccagaagcgggtaaccggttgaccctagacagacttatgtttggtattcgtcaagcccccatcgggcgactggaacctgatcaattagatgatttgattgctattcttagaagaatagtttcctagattttatagcacttcccctaaacgtctaagtatgccctaaatcgtagctctaatgcagatgggcgggcgaggacgttccgggaagcatcgtcaagagtgtcgatgtcgcctgctctagctaagactcgctgcctaggaaaatcctgaacccaagtggctcggtatttgggggtgtagttcctggcgctatcggtgatgtccatagcagtcttggcggcggacgtgttcgttaagtcaataggactccagctggttttgtactcgtaatcttcaagatcaacatcgattcttagctcagtattgaggatctcgatcatgaaactcgaatcagagggaaaacttaactatcatatgcaatatcttcttaagaagagcgcttgccgactacgttatcaagcgatcccacgagcaccaatctggtatcggtaaaagtgttcgcttttctcggcggaaaatccccaaaatgcttggatatttttcttgacggatgaacttggagaagcgctgttctaatgcggcgtcacgccagacagtgtgcgcccggcatcgcccaagcctgagtgtccgaaacatgcttgatgcgtgtgaagcgttcctgcgaccaaggctcagcttgctggggatgctctaattacttctgctgctcgatagtatgcgtcctaggatagacgttgacttgagttgaggttgtctggctcttcgggcctgaggtggggcagctagtcggggcccggtgcggtgaggggtcggggttattcggcaggatcagcagcgcccaaactcgctgctccaagaagaccccgactgtgtgtgagcctaccaactactgccctcgttgtgatgccctaacctgcccggtctgtacgtgaccgacgtcgagcgcggacccgatacgattatggtgggggtgaagttagctccgggcgaggggttctgccccgactgcggtgtgctcgcgtctccccatggccgccgccgggtcctgcacgatgtttcttcggcagtatggcggtcgtgatcgggtggtgtacacgcacgtggcgctgcctcgaagccttgtgtagcaagggctctttcacggaacaagatcctgggatcgccgtactgtgggcggtgttgacccgccgtgccactcgatgggccgtggggcagctgcgccgagaacgcgtctcagtgctgggactcgcacgccaagctcagggcgactggaagactgtctggcgggcggtcaacccggtcttagaggaggcggacgctgacccagtccgctttgcggggatgcggcacctgggggggtgagcacgtctggcacgacaagaacccacgaacccggggaccgaagatgctcaccggcatagctgtcttcacgcacaccgacgacgtcccacgggcccggctgttagacctgaccctgggccgctccggaaccgtgtatggcgtctggctccagtaacgcggccaagcggtggcagcaggtcgagatcaccgcgttggacccgtttcgcgattacaagcacgctatcgatgatcacctcgataacgccacagccgtactgagtcccttccacgtcgtgaaacttgccgcccaggccctcgacgaggcccgacgccgggtccaacaagccccctcaggcaaccgcggccggactagcgacccgctctacggcattcagacgatcctgcgagccggggccgagaacctgtccgacaagcaaaaacaccgtcttgccaccgtgatcgacgctaacgaggcacacgagaaaatgttcattacctggcacaagcagcgtaacggctccgggccgtcaacagaccgatcgaactctaccgccgcatcgcccgtggctccagcaactgcgacaactaccgcctactccgctgctcatcgccgggggcaacacacacgaaccaccgccaagtcagacgagccatttatagcccaacagctatttgggtgatctcctcagcctgacagcgccagacgtcggtccgccatgctaagctgaacgcgtcgcttaagcttcgggaatagaaatgggaaacggtatgactcaaatacttattcaaatactcccggaatagacattcttgcggcgcgctccgctctaatcatttcgtggccgcctctcctacgacgaattgtgcattagggaagtacagtgcatctcagtccatatgtagtctttcgcaggacacgactcgcctactctcaacttcagagcagctccttcgacgcactctggcagcaagtgcaagaaatggtcgataagcatgcgcaattagaggttcagaccagcaggcttacggcacacctggagtctgttatttcagtaactgcgcctcgtgacagatctcgactaatcacattaaagcgtgacgtgcataacatgcgcgtggaaaaagtgaagcaaagactactgcactgtcagggctgcacggctagcaacattatggagcctgtatctagttggatcgatacatgtcgatcatacgaaatacttgagcgtcggttgagtcaagtatatgcggacagccgagacgaagtgtctcgtcactacaggtccctctaccaggctgacgcaatagagccaagcattcaactctcaggtggccagctccacagtgacctgacgcgtctgattagccacggttctaggataaaacccactaaagagcggactctggaaacgactcttgtaaactatctctacagggcagcaacaaagccatcacctttcggtcgtttcgtggaagtaggggccttcgacccgtctcaaccaaattccgaacctcgacgctgcagtgaatccagcgtgacgacaaaccggattcttaccagctggctcactgcagtaacagcgcgttctttcgccgcaccagaaatgcttgctatcctcaacagcaccctgcgcgttaaacgcgatataatccagttcattggaattccacctggggagtggcgaggtgcaccgagcattcccgaggagcgcctgctaactatccgcaagcgcgaagatatgatgtctgttcttaagctcctaatgggcggcccaagatcagtcggtgacctcattattgcccttaatgaccaaggcatagatgaatcacacgcaactaatcttctcagcagtttgagtacagcagggataatcttctttcggctcccagtagatgaccatgacgtacactatgtacagactgcgtgtacagcgctaaggttaaccaaagatgagtcacttcgtgccgctttccaaagtctggcgaacgctgaaaaggagttccccacagcgtcagtcgccacgcgtcacgaccttctcctcagcatcaaggattccgtgaatactgtcgcgtcggcacatgatgtgccggccccaccggacagcgtactcaagagccctttgtatgaggacctccccgccaccgcggcaccccagacatgggattcgaacacggttgagagatcagcccgcgcactcaggagcatctggctactgagcgatttaatggatagctctcaacgccgacagttgggcctctcccagttcatagcagacatgaataatggcgcgccagttacttttctggatttcttcgactcgttttcgcgccttagcattcgtgagcgccaaggaatcctgcgcggagaaaactcaccgcaaatcgcccgtttcgctcagcaatatagtgaagcattgcttaaaattcgcgatgccgttaactacacgcaggacgaagcccaccttgaatctcaggtaattctcgatgcgatcaccaatattgatgatttccgaccgactaagtcggtcacaattcgaggacaattcacaacatcgctcacctcccatataagccaactgataatcaacggtgttatgacgggatacggtacatacatgtcccgattcgcaacatttgtaaacccatcaggtacttggagtctagtcgacgggattcggagacatctatccgatcattttccaggtcaatgtgatttgaattccgtactgggattcaacttcaatgttcatccgcaaatgacagcacatagtatcgcctatcctggagtagttcctgtgcttaatggtgccaagacacattcgattcaggatttaatactgattccaactgctgaagcaggtccgcgccgcgtcgctatctttgatagagcagagaacgaacttatcgacctccagcccatgaatttcatggttccttttggggtgcctttgctgtatcggactctagagttcctgtgcccatcgaccagatacctatggaacccagctcaagaccttctggatatcccaatgatagagaacagttgccctcggatttactttgacgacgtagtggctcaacgccgttcctggacgtgcagcgccgagacgctcccgtgtcccccagagaaactctttaggggtgatcttgctgctttgcaagccttcgactcgtggagactatcagcgagggtacccagacatgtctttgccctagtacaaacggctacggaaagacaaattttttccggagcggccgacgcgccaaccttgctctccgaatacaagcatcttcggagagcaagtgtgcataagccaatctacctggatctacgaaacccacttctagtccgttctctcgcgaaggtgatcatgtccaggcccgaactatatgtcacgttttccgagttcctcccatcggaggccgattacacgcagaacggaagctgccccagttacgcagaggagtacttcattgaactgtgtgccgagtgacagcgcaagcatgtctgatcctggcggctggcgggcgctccatattcacttgcctccctcggtgcagtccgagtacctagctgacgtgattcttccctcgatgtcagccttgatgccagaacatgactacttcttcctccgatattggcaggggggatcacatctccggcttcggctccgtagcactcccgagcgccccctagatgatgaggctatcaacgaggttgcatgccatctccgtagccttctcccggcgttgtcagaccaaaagcgcgcggagtaccgctattcgcaatcgcttcaggatcagttagccgaaatggaaagggctgattgccttcccctagaggcggttgggaccgtggtagagcgccggtaccagcctgaatatagaaagtatggcggatcggtcggagtatccattgcagaggatgttttctgtagtactagccgatctgtccttcgcattctaagtgagcgaccaactagccaccgacagcccttggggtatgcttgccaagttttcatccagatgctgggctgcttagggctcgcaacttcgcaggttgaccagttcctcaccagatatgcgcagtggtggaccccttactcaatggccgctcgccctgagatcttagcggcgcgtctctacgccaacttgtcaagcgtggtggcggacctatgggccgcaagtgagcccaacggaatgttctcggttccggctctcaatgcttatacccaatggtcacggcgacggtcgtccgcgagaaataccagcgtaaagatagacccaatgtttctatcttgcttagcgaactacattcacacaaccaataaccgacttgggctcccacccgccctagaatcgacagcggcatatcttgtccaacttggattccgatcggtggctgtcaggggggagaaagtgcgatgaatccaaaaaactccaaagtgacggaactttggtttccagataattcagactcgccatgtactcttcttctcgacttatctcgggcctccgctgagggcactgagcctagtcctcaatactactgtcgaacttgggacccaacaacaaaagatcccggagtaagggttggcatacttgatcccaaccgcttaactcatcaaacggctttccttggcggttccggtattacgcatcacttcttggtaatggaaaaaccacccagctggcctcttctatggaacgcgggtttcgcgggcttgaagctttccacgataagcaaacaattgttcaccgcgtcatatccatggatggtaaagtgggcgctacaggcatcggcttggacggacgacgaacgccttctggctcttacgaaacttctagttgcccacgctgatgcaagccttccaccggtcgataagactgaaatgctcggccgcctccctttgaagttgagcttgcgactgatcacatatcgttcccactacgaaagcatccgcgctcgcacgattgacccgaaagcgatggatactgcggttaatcgggccttcatgaagtatcaagacgagctcctgcgatggtcccagtcgttgacatgctcgtcgagctatcgtgagaaagaatggagtaatcccaacctttcagaatggagcgccatcatttattgccatctcccacaaattaggcaactcctcagcgggggaggattaactgtcgcgggcccgacacgcgaggatatagaagcctccttaggtcacagtattcctgatacacgatttcacgagcgtcttgaccccgccatgcagtattatctcaatcatgaccaagacttcacggcatacagattctgcacgggttttttgtacagcaacctgtactcgctaggaataccgttgaggctgcgctaccttgtctgtgggttggcagcacgtttcaacgaggagctgtcggacacgacttggcgcgatttacgggatctcttccacgaggctgctactgttgcatattacacacgcgacacagacgggagcgggattagataatgacagttgagcgtcagcctctgcgggagcgtgcaaggagcctcgtttcaccatacggactagtttcccaagtacaccctctgcacgccaatgaagcagatccaccgtttcatgtgcatttgggtcgaacaggccactcaatacacgaggggcaaattacttttgagggagatatcggaaacaccgacggggcagggtcgggatccgacagtaccacggcagaatttattgcagtaatggagtccttagagcgctactccagcgcaatgtgggacgctcgttcctttttgctggaatcggaaaataatctgcaggagcgacttgtatctcccaaccaattcccacgctgttctacagccgagctagattctggacatgtactcaggcggtacgacccgggcgtcccaatacgatgggtcagaggatggtcactgacttcaggtcatcaggtgtgggttccggcgatcgcggtttatctgcatctgccgtacttaaacgactctgaacgattcatacgttcagtctcgaccggatgtgcggttcatgaatccatgcggaaggctgttcttaacggtcttttagaagtcgtcgagcgagatgctattgctttgacttggttgcatgagttgcccttgcccagaatcgcggctagcgaggccggtgagttcccgccggaagcgctagccagttggaagtcatatagggattacggaatcgagacccatctctttgacgcaacgacggattttgggattccggtgatctttgcgctccagatatcggatcaggatgacgacatcgctcagctcgtaggcgctgcatccgctttggaacccgctgaggcgctgactaaagtattcagggaaatggcatcgatccgaatagcactacgcgcctttctcgcccagtccacatcgattaagatttaccccgatgtggctaacgtgacagggggtgccgccctcatgggccagcgcgcgtaccgagatgcattttccttcctccttaacagcgagcgcgaaacgtcaccgtcgcggatgcctaacctcctagagctgaatgatgatccactgcgcgagatgattattcgaatacgcctggctggcgctgaagttatcgccgtcgatatcacgacggacagagcgaggtcagttggtgcaagagtagtgaaggttttggtcccagaggcggttccactctcctttgttcaccgagagaggtatttagatactcctcggctcatatccgcgcctaatagcatgggatatttggttgacacagcgcctacgttcaaccggaacattcaaccttttgcgtgaaactcatatcaaggaaggccagaccgactaatggaccgcttcgttgtgactcggacgctcttcggcgtggagctcgctaaagaactccagtcctccatcttagaggatgggccatacataggcgactcagttcctcactggaaacaaaatcaattactcgtgtacgtgacgacagatgaggcatccccaaggttggactcaattgacggcggggcgttctcagctggccggccttggctccccgtccgtcttcgacccacagtgattcactgcggccccataatttggccaggtagtacgccttgcttccggtgcagtgtgaaccgaatgaagcagcactctcccatgcctagtctcgtaggttcaggaccggagcttgtggaaggctatgcggcgtttcatgtcagacttatagcggcagcgatctcgttgctggaggagagattctctgagggggagatcttaggtaggggcttatcatttaatcttgtcaacgggtttcttaaccactatcctatcgtgcccgttgatcgctgtccgagatgcggtggccgtttcggtaaacgggaagatgagcaccaagagttgggctgcgtcgcacgggaggtgtgtcaagtatgaagggtataatcagtggtgaacaggtgggaaatgcagctcgctttgacaagcagttcagggtccctcgtcggccgagcaggcggctcggtgtcgatattgagatccgtgaggatgcaacaattctttggggatcagatcgtctgcagacatttacaggaggaatgaaaccttcactgattgaggatattttacgagcgtgcgacggaactaagacggcacgtgagctcgcctctgtatgtgatgttacggagcccttgatggacaagatagtggcccttctctgggtctcgggtgctattgaggaggcgggcccgaccgatgttgaaagttctccgcttggggtccttttgtctcgccttgggaacgcaactggggcgaatgctagctggcaggaagctcagcacagaattaacagcatgccgatctgtgttatgccccattcggaacttggaacggaggttgcgggcgcgcttgctggcacctttgaggttatcaatgaagaggcagcttttgaacgcggcgtggttctattcatctttatcgaaaccgcgtcgtctaagatcgaacagcatcacaaatttgatgaactgacaaagagaagagtgctattggttagcgctgcgggtgacgaagttgtagtggggccgctttatgaccaggctataacgccctgccttcggtgctgttcgtcatcgaggatcaagctggatcggggtgcctcgagcccggcgcagcttcgtctcatggctggaattgtctcgcatcatattgttgcgttggtaagcagggcgttactctcaccgctgcccacggattccttggcgctgaatgtggtcactggtgtccagcgctactctcccccggtgtccagaccgggttgccccgaatgttcgcatgcgatcccagctattgctagtgagccgacggtcggtgccgtgtacgaggcttccgtagcactccctccgcgagaattcgtgaatgtaagggactatcaagcccacttcttgagcgcaaatcaacaacttcaaacgaaatttaagtcatggggaaaaagggaaaaattccctttgcctgacattaatatttcagacctacatatacagattgacgaccttctttttttagctgctgcccttaggtttgggttcggaatagacccggagcggaccacttcaaaaatagcgaagcgctggacggcctctggtggaaacattggctcggtaaacgcattcgtgagccttcctgcgatggtagggcacattcccagtgggatttatggatattcagttagcgatcattccctagccaaagttagtcaggagttgatttcggcgactgacatcatgatcgcggcttctgccgacctacggaagatcgcttctaaatatgggacattcggcttgaggatcgcgattatggacgccgggtgtgccctttcaacggtgcgtcgtgtctgccgggaagtaggccgtacattttcgatgtggagcgctgacctcgacgctgggtctattagcgagatgctgcatctttcaagtgcgcgtgagcctattattggagtttcagtgctgggaaaggggcaacgagggtgaggacagacattcccgtaatgaatgccattctgtgtggaatttctggtttgaggccgagagttgcggagctccggctgaatcatgtaccaggagaacttgaaggtgacctgatcggcgagttctcggggccagttactccggatgaaggatcaccttgtctgccgtgcaagagcttccccgaattcttgcagacaaggaggtcggtatcccattttagagacgaggcggttgacgcacgctgcgtcatccatgcagtggctcaggctcttgaggatgatgagcgactgtgggggtgctcagagaccgctggtcttcttgaggcgtttgtctttgtgcttcgagatagtgttggcggtcctggaccggggatctatcaggtgcggcgcgattctgcggtgagaatgacaactgccgctgaacttggcgatccgattcgattcggtgttcaggaggaattcttcgcagggtcaggggtagttatcttttgcgcgaatctggacgtggaggatggcgccggaggagcaaacggatacttagttaatactctccgagcttccatggcactctacgaagtccatgttgaactcggttgcatggacgtggttggctccgttttcggaggcttcattccagcttcgctgcgatcgctcctgttggcagatatggttactcgtcagcaaatcatctcttgctcctatggttttccagcctaacttgctcgacccgccagtagctgggttgtgaattgggtaatgaatggatcgaaataatttgtaccatctgagtcgcgagaaggtaaatacaaatgaaaatgaggcacttaatctcaatgtgatggagttctcggacatgattagcgacgctactgagcgcgacgacgtcactcagataatggcggcatcttgcgtcgagacgagtgtatcgtcgagttccacgtcatcttcatgatcgccaagtggcagattatggagccaggagaagaggtccgtacagggcgaatactcagacgcgacttagccttcgcagttgtcgtggaagtttatctagccgtcttaggttgtttcagcaaccctacacgggaagatactcttagcgctctggggtgggattatttggttcgccaaagcgattcaaggcttcctctctaggcggttatgattagtgtcgaaaccaattgaggggaggtgaacagaatggagaacgaaacgttggaccttgacgtgatggagctggccgatatcatcggtagtgcttctgatcaagacgacatggctcaggtcatggctgcgtcgtgcaccaccacgagtgtctcgacgagctcttcgtcgtcctcgtaacgagatgggcgggctggcgggtgcttttcgggcccgccggcccgttcctttgttatttacggttctttgcttgagcgggctgaatcgtggtggggaggttgtctaaaatttgggctcgggctcgaggccggccgcgtaaattgaccacaatgagcgtgctgcggtaacttagacgtaagatacgcttctcctgctagccttatttgttacccgtttggatttcacctagatgcacgctagggtaggctgattagcttttatggaaatgatattattattatgataattagtgtagatgggatttggaggggcatcgtgtagctagtctcaaatagaagcgatcccgcagtgcagcgtattttggatatgtccaggccttcgttcaagctggtttgatgtttttaaaggatgtggtgaccgttcacattgcgcatggctgccggtgtgcacattgttgagatgtattcggaggctggaaaggcagcggctttttcaattgacgcgtatgcaaccctgggggttccatatcgagaaatgtcatcattgttgttgtcgtaagtattcaaggtgggtaagcgccctgagattttcgctgttgatcgggtggcgcatgaggctaatgccggcgtaattgatccgaagctagatttggttgttttgaacagtttgcacaccgtcggtaatatgggggcgataatttagacctcctttgtgcttggctcaagggcttttgttctagtggacagaaacttgagctctatttccgataggagggttcttctggcttctcctagatacgtctttcttcttctggttctgagagctagtcgcgatgagcttcttgagttgtgcaccagtcgtcgggaactggtgaaattcttggcggatggctatgtggatatggcctttttctggtcttgagaccatccgatcacgatggtctagggaagcaaggataagggtgtgtcgataatttgattatcggatttccatctccgttagaattctgatgctggcggatgctaagtcattgaatgatgtgtctgtggcggtcggaattggactacatgagaggccgcagcgtgacttggagagcggatcttaggaatcagttcagggccaggactcccatccaggccatcagtttgttggcgaagctgacgatcagctgcccgatccagttctgtgtgaagccttttcaacgacagatcggtcaggctggtgtccttcgctgtcagggtcaggtctaacagccgggcccgtgggacgtcgtcggtgtgcgtgaagacagctatgccggtgagcatcttcggtccccgggttcgtgggttcttgtcgtgccagacgtgctcacccccccaggtgccgcatccccgcaaagcggactgggtcagcgtccgcctcctctaagaccgggttgaccgcccgccagacagtcttccagtcgccctgagcttggcgtgcgagtcccagcactgagacgcgttctcggcgcagctgccccacggcccatcgagtggcacggcgggtcaacaccgcccacagtacggcgatcccaggatcttgttccgtgaaagagcccttgctacacaaggcttcgaggcagcgccacgtgcgtgtacaccacccgatcacgaccgccatactgccgaagaaacatcgtgcaggacccggcggcggccatggggagacgcgagcacaccgcagtcggggcagaacccctcgcccggagctaacttcacccccaccataatcgtatcgggtccgcgctcgacgtcggtcacgtacagaccgggcaggttagggcatcacaacgagggcagtagttggtaggctcacacacagtcggggtcttcttggagcagcgagtttgggcgctgctgatcctgccgaataaccccgacccctcaccgcaccgggccccgactagctgccccacctcaggcccgaagagccagacaactcttgttgagcttcaaagccatgaaatcttcggtctgcttcttaatgccagtctctgccgggaatcgctcgatggaagatgcgccgtagaagcctacgatgccatcggtgtgatcgagaatgtattgcgcatcctcgggattggcgatggggccgccatggcataggcataggatgtcgggattgacggatttggcggcgtcggcgagttcctgaaccttgacagcagcatcctcgatagtgagtgctgtttttgcaccaatggttccggaggttgtcagacccatgtgggggacgaggatgtcagagcccgcccgggccatatccttggcctggtcaacgtcgaaaacatagggtgaggtgaggagatcaagatcgtgggcaattttgatcatgtcgatctccaaaccgtaccccatgccagtttcctcgaggtttgcgcggaatgtgccatcgatgagaccaacagtagggaaattctgcactccggcgaaccccgcggctttgatctgggttaggactggggcatcactctgaagggatcagtgccattaactccggcaagaactggggtgtgcttgacgacgggcagtacctcgcgcgccatgtccatggcgatctcattggcatcgccgtaagcgagaagccctgagagggagccgcgacctgccatccggaaacgtcctgagttatagatgacgagcagatcgataccgccggcttccgcggatttaaccgtaatcccggtgcctgcgccgccgcccaccaaggggattccgttggcgacttgtccgcggaactttttcaggatttcagtgcgggtcatgatgctattcctttccgattagttatggatgatgagctcgtgaagagcccgcgccattgcttcgccaaaaccagaatcattgatattttgttttcgctcagtcacagtgatgtcggtatcctttattccctctcgaatggcgttgaacaaagcgtcatcggcttctggatcatagaaatcttcacctggggtatctattcctgcgacccccagagtaggaatgaaagcttgagccgggccgcgcgcagcggccgcctttatggcgattctgtgaccaagctcggccatttcggtgttgctcgtttgagcgtcaccgctggattgtggatatgcaacgtgcgagaggaatagcgctccggaatagtgtcgacagggccgaaattgaccatgtcaagcgcgccaagactgatgacttcgggtattccaaggtctgctgcggcttccatccggcggggtcctgccgagagaactcctccgcagaggtcgtcggcaagctcggtagtcgtcaggtcacatattcccgcgagtagcccagacgatgcgagcttttctatcgccttcccctcccggaatcagttgcgtggaagacgaggacctcgtacccaaggtctgtcaaggtcttgcgagcttcgtcagcagccggcgttgtcaatccgaacatcgtcaggccgacgaccggtttgttgtgagcggggttgctgacggttctaacgtcttcatactccttggccatggctgtgatagcggcggctgcattggcgaagaccatgagcgacacggaattgatgccggccacgtcaacgacggagtacataagtgtgacgtcggtttgtcccacgtaggggctgacatctccggaagccatcgtggaaaccaggagcttggggaatccaatcggcaatgtctgcatgaccgaagccgctacggatgatccacctgatccgccgagggacaggagaccgtggattttcccctcttcggcaagcttggatgcaataatcgaagcgccacggcccatgacatccatcatttcgccacggttatgacgtgttcggatgtcacttggcgactcgcctgcggcacgaatgacctcatcggacgtgtagtcggctatacggctgttggagaatgagccaacatcgatgatgactacctggctgccgttggtaagaatgcggtgacgaagccagtcgaactcgtctcccttggtatccaaagttccgagcaaagctattgcggccatgaacactccttcgtgatcgtgtcatcatgaccgtagttcggtgattctgcctacaccatgccgtttgagacgaattggcctgtacgttgtatcgctggttgtgaagaagggcaatacttcaggtgtggttgtcaaggttgaccctgcaagtctgagccggatgctgggggagtggagccagcccggagaagcgcttccggaagcgttggcggacgcattgctggatctcattgacgctggttttgtgcccgctggtgcggttcttccaccccaacgagcatgcgccgcgacactgcaagtatctcggcaaaccgtggcggaggcatttgggattcttgaagccgcaggccacattgcggcgttggttgggtcagggacgcgggttagatcaggccgcgctgcagtgagtactgatggcaggttgttctcgttcagcgaggctgcacctggcctgatcgacctgtcaacgggggcgctacctgcgtcagaggtggtgcgaagagtgcggctagaagaccacgtcgacttggatgagtatttcgataccgacggatatttcccggctggactacctatattgcgtgcagccatcgcggaacggctcactcgagatggagttcccacagtcccgcagcagatcgttgttaccaacggcgctcagcatgcgagttatcttgcctctcagctcctggtctcggctggtgacaccgtgttggtggaggagccgacatatcggggtgagctcgcagagctgcgactgatgggcgcccgtgtgaagagtgtccc

SEQ ID NO: 57 - DNA, 12237 bp, Propionibacterium acnes
gttgtctggctcttcgggcctgaggtggggcagctagtcggggcccggtgcggtgaggggtcggggttattcggcaggatcagcagcgcccaaactcgctgctccaagaagaccccgactgtgtgtgagcctaccaactactgccctcgttgtgatgccctaacctgcccggtctgtacgtgaccgacgtcgagcgcggacccgatacgattatggtgggggtgaagttagctccgggcgaggggttctgccccgactgcggtgtgctcgcgtctccccatggccgccgccgggtcctgcacgatgtttcttcggcagtatggcggtcgtgatcgggtggtgtacacgcacgtggcgctgcctcgaagccttgtgtagcaagggctctttcacggaacaagatcctgggatcgccgtactgtgggcggtgttgacccgccgtgccactcgatgggccgtggggcagctgcgccgagaacgcgtctcagtgctgggactcgcacgccaagctcagggcgactggaaaactgtctggcgggcggtcaacccggtcttagaggaggcggacgctgacccagtccgctttgcggggatgcggcacctgggggggtgagcacgtctggcacgacaagaacccacgaacccggggaccgaagatgctcaccggcatagctgtcttcacgcacaccgacgacgtcccacgggcccggctgttagacctgaccctgggccgctccggaaccgtgtatggcgtctggctccagtaacgcggccaagcggtggcagcaggtcgagatcaccgcgttggacccgtttcgcgattacaagcacgctatcgatgatcacctcgataacgccacagccgtactgagtcccttccacgtcgtgaaacttgccgcccaggccctcgacgaggcccgacgccgggtccaacaagccccctcaggcaaccgcggccggactagcgacccgctctacggcattcagacgatcctgcgagccggggccgagaacctgtccgacaagcaaaaacaccgtcttgccaccgtgatcgacgctaacgaggcacacgagaaaatgttcattacctggcacaagcagcgtaacggctccgggccgtcaacagaccgatcgaactctaccgccgcatcgcccgtggctccagcaactgcgacaactaccgcctactccgctgctcatcgccgggggcaacacacacgaaccaccgccaagtcagacgagccatttatagcccaacagctatttgggtgatctcctcagcctgacagcgccagacgtcggtccgccatgctaagctgaacgcgtcgcttaagcttcgggaatagaaatgggaaacggtatgactcaaatacttattcaaatactcccggaatagacattcttgcggcgcgctccgctctaatcatttcgtggccgcctctcctacgacgaattgtgcattagggaagtacagtgcatctcagtccatatgtagtctttcgcaggacacgactcgcctactctcaacttcagagcagctccttcgacgcactctggcagcaagtgcaagaaatggtcgataagcatgcgcaattagaggttcagaccagcaggcttacggcacacctggagtctgttatttcagtaactgcgcctcgtgacagatctcgactaatcacattaaaacgtgacgtgcataacatgcgcgtggaaaaagtgaagcaaagactactgcactgtcagggctgcacggctagcaacattatggagcctgtatctagttggatcgatacatgtcgatcatacgaaatacttgagcgtcggttgagtcaagtatatgcggacagccgagacgaagtgtctcgtcactacaggtccctctaccaggctgacgcaatagagccaagcattcaactctcaggtggccagctccacagtgacctgacgcgtctgattagccacggttctaggataaaacccactaaagagcggactctggaaacgactcttgtaaactatctctacagggcagcaacaaagccatcacctttcggtcgtttcgtggaagtaggggccttcgacccgtctcaaccaaattccgaacctcgacgctgcagtgaatccagcgtgacgacaaaccggattcttaccagctggctcactgcagtaacagcgcgttctttcgccgcaccagaaatgcttgctatcctcaacagcaccctgcgcgttaaacgcgatataatccagttcattggaattccacctggggagtggcgaggtgcaccgagcattcccgaggagcgcctgctaactatccgcaagcgcgaagatatgatgtctgttcttaagctcctaatgggcggcccaagatcagtcggtgacctcattattgcccttaatgaccaaggcatagatgaatcacacgcaactaatcttctcagcagtttgagtacagcagggataatcttctttcggctcccagtagatgaccatgacgtacactatgtacagactgcgtgtacagcgctaaggttaaccaaagatgagtcacttcgtgccgctttccaaagtctggcgaacgctgaaaaggagttccccacagcgtcagtcgccacgcgtcacgaccttctcctcagcatcaaggattccgtgaatactgtcgcgtcggcacatgatgtgccggccccaccggacagcgtactcaagagccctttgtatgaggacctccccgccaccgcggcaccccagacatgggattcgaacacggttgagagatcagcccgcgcactcaggagcatctggctactgagcgatttaatggatagctctcaacgccgacagttgggcctctcccagttcatagcagacatgaataatggcgcgccagttacttttctggatttcttcgactcgttttcgcgccttagcattcgtgagcgccaaggaatcctgcgcggagaaaactcaccgcaaatcgcccgtttcgctcagcaatatagtgaagcattgcttaaaattcgcgatgccgttaactacacgcaggacgaagcccaccttgaatctcaggtaattctcgatgcgatcaccaatattgatgatttccgaccgactaagtcggtcacaattcgaggacaattcacaacatcgctcacctcccatataagccaactgataatcaacggtgttatgacgggatacggtacatacatgtcccgattcgcaacatttgtaaacccatcaggtacttggagtctagtcgacgggattcggagacatctatccgatcattttccaggtcaatgtgatttgaattccgtactgggattcaacttcaatgttcatccgcaaatgacagcacatagtatcgcctatcctggagtagttcctgtgcttaatggtgccaagacacattcgattcaggatttaatactgattccaactgctgaagcaggtccgcgccgcgtcgctatctttgatagagcagagaacgaacttatcgacctccagcccatgaatttcatggttccttttggggtgcctttgctgtatcggactctagagttcctgtgcccatcgaccagatacctatggaacccagctcaagaccttctggatatcccaatgatagagaacagttgccctcggatttactttgacgacgtagtggctcaacgccgttcctggacgtgcagcgccgagacgctcccgtgtcccccagagaaactctttaggggtgatcttgctgctttgcaagccttcgactcgtggagactatcagcgagggtacccagacatgtctttgccctagtacaaacggctacggaaagacaaattttttccggagcggccgacgcgccaaccttgctctccgaatacaagcatcttcggagagcaagtgtgcataagccaatctacctggatctacgaaacccacttctagtccgttctctcgcgaaggtgatcatgtccaggcccgaactatatgtcacgttttccgagttcctcccatcggaggccgattacacgcagaacggaagctgccccagttacgcagaggagtacttcattgaactgtgtgccgagtgacagcgcaagcatgtctgatcctggcggctggcgggcgctccatattcacttgcctccctcggtgcagtccgagtacctagctgacgtgattcttccctcgatgtcagccttgatgccagaacatgactacttcttcctccgatattggcaggggggatcacatctccggcttcggctccgtagcactcccgagcgccccctagatgatgaggctatcaacgaggttgcatgccatctccgtagccttctcccggcgttgtcagaccaaaagcgcgcggagtaccgctattcgcaatcgcttcaggatcagttagccgaaatggaaagggctgattgccttcccctagaggcggttgggaccgtggtagagcgccggtaccagcctgaatatagaaagtatggcggatcggtcggagtatccattgcagaggatgttttctgtagtactagccgatctgtccttcgcattctaagtgagcgaccaactagccaccgacagcccttggggtatgcttgccaagttttcatccagatgctgggctgcttagggctcgcaacttcgcaggttgaccagttcctcaccagatatgcgcagtggtggaccccttactcaatggccgctcgccctgagatcttagcggcgcgtctctacgccaacttgtcaagcgtggtggcggacctatgggccgcaagtgagcccaacggaatgttctcggttccggctctcaatgcttatacccaatggtcacggcgacggtcgtccgcgagaaataccagcgtaaagatagacccaatgtttctatcttgcttagcgaactacattcacacaaccaataaccgacttgggctcccacccgccctagaatcgacagcggcatatcttgtccaacttggattccgatcggtggctgtcaggggggagaaagtgcgatgaatccaaaaaactccaaagtgacggaactttggtttccagataattcagactcgccatgtactcttcttctcgacttatctcgggcctccgctgagggcactgagcctagtcctcaatactactgtcgaacttgggacccaacaacaaaagatcccggagtaagggttggcatacttgatcccaaccgcttaactcatcaaacggctttccttggcggttccggtattacgcatcacttcttggtaatggaaaaaccacccagctggcctcttctatggaacgcgggtttcgcgggcttgaagctttccacgataagcaaacaattgttcaccgcgtcatatccatggatggtaaagtgggcgctacaggcatcggcttggacggacgacgaacgccttctggctcttacgaaacttctagttgcccacgctgatgcaagccttccaccggtcgataagactgaaatgctcggccgcctccctttgaagttgagcttgcgactgatcacatatcgttcccactacgaaagcatccgcgctcgcacgattgacccgaaagcgatggatactgcggttaatcgggccttcatgaagtatcaagacgagctcctgcgatggtcccagtcgttgacatgctcgtcgagctatcgtgagaaagaatggagtaatcccaacctttcagaatggagcgccatcatttattgccatctcccacaaattaggcaactcctcagcgggggaggattaactgtcgcgggcccgacacgcgaggatatagaagcctccttaggtcacagtattcctgatacacgatttcacgagcgtcttgaccccgccatgcagtattatctcaatcatgaccaagacttcacggcatacagattctgcacgggttttttgtacagcaacctgtactcgctaggaataccgttgaggctgcgctaccttgtctgtgggttggcagcacgtttcaacgaggagctgtcggacacgacttggcgcgatttacgggatctcttccacgaggctgctactgttgcatattacacacgcgacacagacgggagcgggattagataatgacagttgagcgtcagcctctgcgggagcgtgcaaggagcctcgtttcaccatacggactagtttcccaagtacaccctctgcacgccaatgaagcagatccaccgtttcatgtgcatttgggtcgaacaggccactcaatacacgaggggcaaattacttttgagggagatatcggaaacaccgacggggcagggtcgggatccgacagtaccacggcagaatttattgcagtaatggagtccttagagcgctactccagcgcaatgtgggacgctcgttcctttttgctggaatcggaaaataatctgcaggagcgacttgtatctcccaaccaattcccacgctgttctacagccgagctagattctggacatgtactcaggcggtacgacccgggcgtcccaatacgatgggtcagaggatggtcactgacttcaggtcatcaggtgtgggttccggcgatcgcggtttatctgcatctgccgtacttaaacgactctgaacgattcatacgttcagtctcgaccggatgtgcggttcatgaatccatgcggaaggctgttcttaacggtcttttagaagtcgtcgagcgagatgctattgctttgacttggttgcatgagttgcccttgcccagaatcgcggctagcgaggccggtgagttcccgccggaagcgctagccagttggaagtcatatagggattacggaatcgagacccatctctttgacgcaacgacggattttgggattccggtgatctttgcgctccagatatcggatcaggatgacgacatcgctcagctcgtaggcgctgcatccgctttggaacccgctgaggcgctgactaaagtattcagggaaatggcatcgatccgaatagcactacgcgcctttctcgcccagtccacatcgattaagatttaccccgatgtggctaacgtgacagggggtgccgccctcatgggccagcgcgcgtaccgagatgcattttccttcctcattaacagcgagcgcgaaacgtcaccgtcgcggatgcctaacctcctagagctgaatgatgatccactgcgcgagatgattattcgaatacgcctggctggcgctgaagttatcgccgtcgatatcacgacggacgaagcgaggtcagttggtgcaagagtagtgaaggttttggtcccagaggcggttccactctcctttgttcaccgagagaggtatttagatactcctcggctcatatccgcgcctaatagcatgggatatttggttgacacagcgcctacgttcaaccggaacattcaaccttttgcgtgaaactcatatcaaggaaggccagaccgactaatggaccgcttcgttgtgactcggacgctcttcggcgtggagctcgctaaagaactccagtcctccatcttagaggatgggccatacataggcgactcagttcctcactggaaacaaaatcaattactcgtgtacgtgacgacagatgaggcatccccaaggttggactcaattgacggcggggcgttctcagctggccggccttggctccccgtccgtcttcgacccacagtgattcactgcggccccataatttggccaggtagtacgccttgcttccggtgcagtgtgaaccgaatgaagcagcactctcccatgcctagtctcgtaggttcaggaccggagcttgtggaaggctatgcggcgtttcatgtcagacttatagcggcagcgatctcgttgctggaggagagattctctgagggggagatcttaggtaggggcttatcatttaatcttgtcaacgggtttcttaaccactatcctatcgtgcccgttgatcgctgtccgagatgcggtggccgtttcggtaaacgggaagatgagcaccaagagttgggctgcgtcgcacgggaggtgtgtcaagtatgaagggtataatcagtggtgaacaggtgggaaatgcagctcgctttgacaagcagttcagggtccctcgtcggccgagcaggcggctcggtgtcgatattgagatccgtgaggatgcaacaattctttggggatcagatcgtctgcagacatttacaggaggaatgaaaccttcactgattgaggatattttacgagcgtgcgacggaactaagacggcacgtgagctcgcctctgtatgtgatgttacggagcccttgatggacaagatagtggcccttctctgggtctcgggtgctattgaggaggcgggcccgaccgatgttgaaagttctccgcttggggtccttttgtctcgccttgggaacgcaactggggcgaatgctagctggcaggaagctcagcacagaattaacagcatgccgatctgtgttatgccccattcggaacttggaacggaggttgcgggcgcgcttgctggcacctttgaggttatcaatgaagaggcagcttttgaacgcggcgtggttctattcatctttatcgaaaccgcgtcgtctaagatcgaacagcatcacaaatttgatgaactgacaaagagaagagtgctattggttagcgctgcgggtgacgaagttgtagtggggccgctttatgaccaggctataacgccctgccttcggtgctgttcgtcatcgaggatcaagctggatcggggtgcctcgagcccggcgcagcttcgtctcatggctggaattgtctcgcatcatattgttgcgttggtaagcagggcgttactctcaccgctgcccacggattccttggcgctgaatgtggtcactggtgtccagcgctactctcccccggtgtccagaccgggttgccccgaatgttcgcatgcgatcccagctattgctagtgagccgacggtcggtgccgtgtacgaggcttccgtagcactccctccgcgagaattcgtgaatgtaagggactatcaagcccacttcttgagcgcaaatcaacaacttcaaacgaaatttaagtcatggggaaaaagggaaaaattccctttgcctgacattaatatttcagacctacatatacagattgacgaccttctttttttagctgctgcccttaggtttgggttcggaatagacccggagcggaccacttcaaaaatagcgaagcgctggacggcctctggtggaaacattggctcggtaaacgcattcgtgagccttcctgcgatggtagggcacattcccagtgggatttatggatattcagttagcgatcattccctagccaaagttagtcaggagttgatttcggcgactgacatcatgatcgcggcttctgccgacctacggaagatcgcttctaaatatgggacattcggcttgaggatcgcgattatggacgccgggtgtgccctttcaacggtgcgtcgtgtctgccgggaagtaggccgtacattttcgatgtggagcgctgacctcgacgctgggtctattagcgagatgctgcatctttcaagtgcgcgtgagcctattattggagtttcagtgctgggaaaggggcaacgagggtgaggacagacattcccgtaatgaatgccattctgtgtggaatttctggtttgaggccgagagttgcggagctccggctgaatcatgtaccaggagaacttgaaggtgacctgatcggcgagttctcggggccagttactccggatgaaggatcaccttgtctgccgtgcaagagcttccccgaattcttgcagacaaggaggtcggtatcccattttagagacgaggcggttgacgcacgctgcgtcatccatgcagtggctcaggctcttgaggatgatgagcgactgtgggggtgctcagagaccgctggtcttcttgaggcgtttgtctttgtgcttcgagatagtgttggcggtcctggaccggggatctatcaggtgcggcgcgattctgcggtgagaatgacaactgccgctgaacttggcgatccgattcgattcggtgttcaggaggaattcttcgcagggtcaggggtagttatcttttgcgcgaatctggacgtggaggatggcgccggaggagcaaacggatacttagttaatactctccgagcttccatggcactctacgaagtccatgttgaactcggttgcatggacgtggttggctccgttttcggaggcttcattccagcttcgctgcgatcgctcctgttggcagatatggttactcgtcagcaaatcatctcttgctcctatggttttccagcctaacttgctcgacccgccagtagctgggttgtgaattgggtaatgaatggatcgaaataatttgtaccatctgagtcgcgagaaggtaaatacaaatgaaaatgaggcacttaatctcaatgtgatggagttctcggacatgattagcgacgctactgagcgcgacgacgtcactcagataatggcggcatcttgcgtcgagacgagtgtatcgtcgagttccacgtcatcttcatgatcgccaagtggcagattatggagccaggagaagaggtccgtacagggcgaatactcagacgcgacttagccttcgcagttgtcgtggaagtttatctagccgtcttaggttgtttcagcaaccctacacgggaagatactcttagcgctctggggtgggattatttggttcgccaaagcgattcaaggcttcctctctaggcggttatgattagtgtcgaaaccaattgaggggaggtgaacagaatggagaacgaaacgttggaccttgacgtgatggagctggccgatatcatcggtagtgcttctgatcaagacgacatggctcaggtcatggctgcgtcgtgcaccaccacgagtgtctcgacgagctcttcgtcgtcctcgtaacgagatgggcgggctggcgggtgcttttcgggcccgccggcccgttcctttgttatttacggttctttgcttgagcgggctgaatcgtggtggggaggttgtctaaaatttgggctcgggctcgaggccggccgcgtaaattgaccacaatgagcgtgctgcggtaacttagacgtaagatacgcttctcctgctagccttatttgttacccgtttggatttcacctagatgcacgctagggtaggctgattagcttttatggaaatgatattattattatgataattagtgtagatgggatttggaggggcatcgtgtagctagtctcaaatagaagcgatcccgcagtgcagcgtattttggatatgtccaggccttcgttcaagctggtttgatgtttttaaaggatgtggtgaccgttcacattgcgcatggctgccggtgtgcacattgttgagatgtattcggaggctggaaaggcagcggctttttcaattgacgcgtatgcaaccctgggggttccatatcgagaaatgtcatcattgttgttgtcgtaagtattcaaggtgggtaagcgccctgagattttcgctgttgatcgggtggcgcatgaggctaatgccggcgtaattgatccgaagctagatttggttgttttgaacagtttgcacaccgtcggtaatatgggggcgataatttagacctcctttgtgcttggctcaagggcttttgttctagtggacagaaacttgagctctatttccgataggagggttcttctggcttctcctagatacgtctttcttcttctggttctgagagctagtcgcgatgagcttcttgagttgtgcaccagtcgtcgggaactggtgaaattcttggcggatggctatgtggatatggcctttttctggtcttgagaccatccgatcacgatggtctagggaagcaaggataagggtgtgtcgataatttgattatcggatttccatctccgttagaattctgatgctggcggatgctaagtcattgaatgatgtgtctgtggcggtcggaattggactacatgagaggccgcagcgtgacttggagagcggatcttaggaatcagttcagggccaggactcccatccaggccatcagtttgttggcgaagctgacgatcagctgcccgatccagttctgtgtgaagccttttcaacgacagatcggtcaggctggtgtccttcgctgtcagggtcaggtctaacagccgggcccgtgggacg

SEQ ID NO: 58 - DNA, 3582 bp, Propionibacterium acnes
cagggtcaggtctaacagccgggcccgtgggacgtcgtcggtgtgcgtgaagacagctatgccggtgagcatcttcggtccccgggttcgtgggttcttgtcgtgccagacgtgctcacccccccaggtgccgcatccccgcaaagcggactgggtcagcgtccgcctcctctaagaccgggttgaccgcccgccagacagttttccagtcgccctgagcttggcgtgcgagtcccagcactgagacgcgttctcggcgcagctgccccacggcccatcgagtggcacggcgggtcaacaccgcccacagtacggcgatcccaggatcttgttccgtgaaagagcccttgctacacaaggcttcgaggcagcgccacgtgcgtgtacaccacccgatcacgaccgccatactgccgaagaaacatcgtgcaggacccggcggcggccatggggagacgcgagcacaccgcagtcggggcagaacccctcgcccggagctaacttcacccccaccataatcgtatcgggtccgcgctcgacgtcggtcacgtacagaccgggcaggttagggcatcacaacgagggcagtagttggtaggctcacacacagtcggggtcttcttggagcagcgagtttgggcgctgctgatcctgccgaataaccccgacccctcaccgcaccgggccccgactagctgccccacctcaggcccgaagagccagacaactcttgttgagcttcaaagccatgaaatcttcggtctgcttcttaatgccagtctctgccgggaatcgctcgatggaagatgcgccgtagaagcctacgatgccatcggtgtgatcgagaatgtattgcgcatcctcgggattggcgatggggccgccatggcataggcataggatgtcgggattgacggatttggcggcgtcggcgagttcctgaaccttgacagcagcatcctcgatagtgagtgctgtttttgcaccaatggttccggaggttgtcagacccatgtgggggacgaggatgtcagagcccgcccgggccatatccttggcctggtcaacgtcgaaaacatagggtgaggtgaggagatcaagatcgtgggcaattttgatcatgtcgatctccaaaccgtaccccatgccagtttcctcgaggtttgcgcggaatgtgccatcgatgagaccaacagtagggaaattctgcactccggcgaaccccgcggctttgatctgggttaggactggggcatcactctgaagggatcagtgccattaactccggcaagaactggggtgtgcttgacgacgggcagtacctcgcgcgccatgtccatggcgatctcattggcatcgccgtaagcgagaagccctgagagggagccgcgacctgccatccggaaacgtcctgagttatagatgacgagcagatcgataccgccggcttccgcggatttaaccgtaatcccggtgcctgcgccgccgcccaccaaggggattccgttggcgacttgtccgcggaactttttcaggatttcagtgcgggtcatgatgctattcctttccgattagttatggatgatgagctcgtgaagagcccgcgccattgcttcgccaaaaccagaatcattgatattttgttttcgctcagtcacagtgatgtcggtatcctttattccctctcgaatggcgttgaacaaagcgtcatcggcttctggatcatagaaatcttcacctggggtatctattcctgcgacccccagagtaggaatgaaagcttgagccgggccgcgcgcagcggccgcctttatggcgattctgtgaccaagctcggccatttcggtgttgctcgtttgagcgtcaccgctggattgtggatatgcaacgtgcgagaggaatagcgctccggaatagtgtcgacagggccgaaattgaccatgtcaagcgcgccaagactgatgacttcgggtattccaaggtctgctgcggcttccatccggcggggtcctgccgagagaactcctccgcagaggtcgtcggcaagctcggtagtcgtcaggtcacatattcccgcgagtagcccagacgatgcgagcttttctatcgccttcccctcccggaatcagttgcgtggaagacgaggacctcgtacccaaggtctgtcaaggtcttgcgagcttcgtcagcagccggcgttgtcaatccgaacatcgtcaggccgacgaccggtttgttgtgagcggggttgctgacggttctaacgtcttcatactccttggccatggctgtgatagcggcggctgcattggcgaagaccatgagcgacacggaattgatgccggccacgtcaacgacggagtacataagtgtgacgtcggtttgtcccacgtaggggctgacatctccggaagccatcgtggaaaccaggagcttggggaatccaatcggcaatgtctgcatgaccgaagccgctacggatgatccacctgatccgccgagggacaggagaccgtggattttcccctcttcggcaagcttggatgcaataatcgaagcgccacggcccatgacatccatcatttcgccacggttatgacgtgttcggatgtcacttggcgactcgcctgcggcacgaatgacctcatcggacgtgtagtcggctatacggctgttggagaatgagccaacatcgatgatgactacctgactgccgttggtaagaatgcggtgacgaagccagtcgaactcgtctcccttggtatccaaagttccgagcaaagctattgcggccatgaacactccttcgtgatcgtgtcatcatgaccgtagttcggtgattctgcctacaccatgccgtttgagacgaattggcctgtacgttgtatcgctggttgtgaagaagggcaatacttcaggtgtggttgtcaaggttgaccctgcaagtctgagccggatgctgggggagtggagccagcccggagaagcgcttccggaagcgttggcggacgcattgctggatctcattgacgctggttttgtgcccgctggtgcggttcttccaccccaacgagcatgcgccgcgacactgcaagtatctcggcaaaccgtggcggaggcatttgggattcttgaagccgcaggccacattgcggcgttggttgggtcagggacgcgggttagatcaggccgcgctgcagtgagtactgatggcaggttgttctcgttcagcgaggctgcacctggcctgatcgacctgtcaacgggggcgctacctgcgtcagaggtggtgcgaagagtgcggctagaagaccacgtcgacttggatgagtatttcgataccgacggatatttcccggctggactacctatattgcgtgcagccatcgcggaacggctcactcgagatggagttcccacagtcccgcagcagatcgttgttaccaacggcgctcagcatgcgagttatcttgcctctcagctcctggtctcggctggtgacaccgtgttggtggaggagccgacatatcggggtgagctcgcagagctgcgactgatgggcgcccgtgtgaagagtgtccc

SEQ ID NO: 59 - DNA, 11477 bp, Propionibacterium acnes
gggccgctccggaaccgtgtatggcgtctggctccagtaacgcggccaagcggtggcagcaggtcgagatcaccgcgttggacccgtttcgcgattacaagcacgctatcgatgatcacctcgataacgccacagccgtactgagtcccttccacgtcgtgaaacttgccgcccaggccctcgacgaggcccgacgccgggtccaacaagccccctcaggcaaccgcggccggactagcgacccgctctacggcattcagacgatcctgcgagccggggccgagaacctgtccgacaagcaaaaacaccgtcttgccaccgtgatcgacgctaacgaggcacacgagaaaatgttcattacctggcacaagcagcgtaacggctccgggccgtcaacagaccgatcgaactctaccgccgcatcgcccgtggctccagcaactgcgacaactaccgcctactccgctgctcatcgccgggggcaacacacacgaaccaccgccaagtcagacgagccatttatagcccaacagctatttgggtgatctcctcagtctgacagcgccagacgtcggtccgccatgctaagctgagcgcgtcgcttaagcttcgggaatagaaatgggaaacggtatgactcaaatacttattcaaatactcccggaatagacattcttgcggcgcgctccgctctaatcatttcgtggccgcctctcctacgacgaattgtgcattagggaagtacagtgcatctcagtccatatgtagtctttcgcaggacacgactcgcctactctcaacttcagagcagctccttcgacgcactctggcagcaagtgcaagaaatggtcgataagcatgcgcaattagaggttcagaccagcaggcttacggcacacctggagtctgttatttcagtaactgcgcctcgtgacagatctcgactaatcacattaaaacgtgacgtgcataacatgcgcgtggaaaaagtgaagcaaagactactgcactgtcagggctgcacggctagcaacattatggagcctgtatctagttggatcgatacatgtcgatcatacgaaatacttgagcgtcggttgagtcaagtatatgcggacagccgagacgaagtgtctcgtcactacaggtccctctaccaggctgacgcaatagagccaagcattcaactctcaggtggccagctccacagtgacctgacgcgtctgattagccacggttctaggataaaacccactaaagagcggactctggaaacgactcttgtaaactatctctacagggcagcaacaaagccatcacctttcggtcgtttcgtggaagtaggggccttcgacccgtctcaaccaaattccgaacctcgacgctgcagtgaatccagcgtgacgacaaaccggattcttaccagctggctcactgcagtaacagcgcgttctttcgccgcaccagaaatgcttgctatcctcaacagcaccctgcgcgttaaacgcgatataatccagttcattggaattccacctggggagtggcgaggtgcaccgagcattcccgaggagcgcctgctaactatccgcaagcgcgaagatatgatgtctgttcttaagctcctaatgggcggcccaagatcagtcggtgacctcattattgcccttaatgaccaaggcatagatgaatcacacgcaactaatcttctcagcagtttgagtacagcagggataatcttctttcggctcccagtagatgaccatgacgtacactatgtacagactgcgtgtacagcgctaaggttaaccaaagatgagtcacttcgtgccgctttccaaagtctggcgaacgctgaaaaggagttccccacagcgtcagtcgccacgcgtcacgaccttctcctcagcatcaaggattccgtgaatactgtcgcgtcggcacatgatgtgccggccccaccggacagcgtactcaagagccctttgtatgaggacctccccgccaccgcggcaccccagacatgggattcgaacacggttgagagatcagcccgcgcactcaggagcatctggctactgagcgatttaatggatagctttcaacgccgacagttgggcctctcccagttcatagcagacatgaataatggcgcgccagttacttttctggatttcttcgactcgttttcgcgccttagcattcgtgagcgccaaggaatcctgcgcggagaaaactcaccgcaaatcgcccgtttcgctcagcaatatagtgaagcattgcttaaaattcgcgatgccgttaactacacgcaggacgaagcccaccttgaatctcaggtaattctcgatgcgatcaccaatattgatgatttccgaccgactaagtcggtcacaattcgaggacaattcacaacatcgctcacctcccatataagccaactgataatcaacggtgttatgacgggatacggtacatacatgtcccgattcgcaacatttgtaaacccatcaggtacttggagtctagtcgacgggattcggagacatctatccgatcattttccaggtcaatgtgatttgaattccgtactgggattcaacttcaatgttcatccgcaaatgacagcacatagtatcgcctatcctggagtagtttctgtgcttaatggtgccaagacacattcgattcaggatttaatactgattccaactgctgaagcaggtccgcgccgcgtcgctatctttgatagagcagagaacgaacttatcgacctccagcccatgaatttcatggttccttttggggtgcctttgctgtatcggactctagagttcctgtgcccatcgaccagatacctatggaacccagctcaagaccttctggatatcccaatgatagagaacagttgccctcggatttactttgacgacgtagtggctcaacgccgttcctggacgtgcagcgccgagacgctcccgtgtcccccagagaaactctttaggggtgatcttgctgctttgcaagccttcgactcgtggagactatcagcgagggtacccagacatgtctttgccctagtacaaacggctacggaaagacaaattttttccggagcggccgacgcgccaaccttgctctccgaatacaagcatcttcggagagcaagtgtgcataagccaatctacctggatctacgaaacccacttctagtccgttctctcgcgaaggtgatcatgtccaggcccgaactatatgtcacgttttccgagttcctcccatcggaggccgattacacgcagaacggaagctgccccagttacgcagaggagtacttcattgaactgtgtgccgagtgacagcgcaagcatgtctgatcctggcggctggcgggcgctccatattcacttgcctccctcggtgcagtccgagtacctagctgacgtgattcttccctcgatgtcagccttgatgccagaacatgactacttcttcctccgatattggcaggggggatcacatctccggcttcggctccgtagcactcccgagcgccccctagatgatgaggctatcaacgaggttgcatgccatctccgtagccttctcccggcgttgtcagaccaaaagcgcgcggagtaccgctattcgcaatcgcttcaggatcagttagccgaaatggaaagggctgattgccttcccctagaggcggttgggaccgtggtagagcgccggtaccagcctgaatatagaaagtatggcggatcggtcggagtatccattgcagaggatgttttctgtagtactagccgatctgtccttcgcattctgagtgagcgaccaactagccaccgacagcccttggggtacgcttgccaggttttcatccagatgctgggctgcttagggctcgcaacttcgcaggttgaccagttcctcaccagatatgcgcagtggtggaccccttactcaatggccgctcgccctgagatcttagcggcgcgtctctacgccaacttgtcaagcgtggtggcggacctatgggccgcaagtgagcccaacggaatgttctcggttccggctctcaatgcttatacccaatggtcacggcgacggtcgtccgcgagaaataccagcgtaaagatagacccaatgtttctatcttgcttagcgaactacattcacacaaccaataaccgacttgggctcccacccgccctagaatcgacagcggcatatcttgtccaacttggattccgatcggtggctgtcaggggggagaaagtgcgatgaatccaaaaaactccaaagtgacggaactttggtttccagataattcagactcgccatgtactcttcttctcgacttatctcgggcctccgctgagggcactgagcctagtcctcaatactactgtcgaacttgggacccaacaacaaaagatcccggagtaagggttggcatacttgatcccaaccgcttaactcatcaaacggctttccttggcggttccggtattacgcatcacttcttggtaatggaaaaaccacccagctggcctcttctatggaacgcgggtttcgcgggcttgaagctttccacgataagcaaacaattgttcaccgcgtcatatccatggatggtaaagtgggcgctacaggcatcggcttggacggacgacgaacgccttctggctcttacgaaacttctagttgcccacgctgatgcaagccttccaccggtcgataagactgaaatgctcggccgcctccctttgaagttgagcttgcgactgatcacatatcgttcccactacgaaagcatccgcgctcgcacgattgacccgaaagcgatggatactgcggttaatcgggccttcatgaagtatcaagacgagctcctgcgatggtcccagtcgttgacatgctcgtcgagctatcgtgagaaagaatggagtaatcccaacctttcagaatggagcgccatcatttattgccatctcccacaaattaggcaactcctcagcgggggaggattaactgtcgcgggcccgacacgcgaggatatagaagcctccttaggtcacagtattcctgatacacgatttcacgagcgtcttgaccccgccatgcagtattatctcaatcatgaccaagacttcacggcatacagattctgcacgggttttttgtacagcaacctgtactcgctaggaataccgttgaggctgcgctaccttgtctgtgggttggcagcacgtttcaacgaggagctgtcggacacgacttggcgcgatttacgggatctcttccacgaggctgctactgttgcatattacacacgcgacacagacgggagcgggattagataatgacagttgagcgtcagcctctgcgggagcgtgcaaggagcctcgtttcaccatacggactagtttcccaagtacaccctctgcacgccaatgaagcagatccaccgtttcatgtgcatttgggtcgaacaggccactcaatacacgaggggcaaattacttttgagggagatatcggaaacaccgacggggcagggtcgggatccgacagtaccacggcagaatttattgcagtaatggagtccttagagcgctactccagcgcaatgtgggacgctcgttcctttttgctggaatcggaaaataatctgcaggagcgacttgtatctcccaaccaattcccacgctgttctacagccgagctagattctggacatgtactcaggcggtacgacccgggcgtcccaatacgatgggtcagaggatggtcactgacttcaggtcatcaggtgtgggttccggcgatcgcggtttatctgcatctgccgtacttaaacgactctgaacgattcatacgttcagtctcgaccggatgtgcggttcatgaatccatgcggaaggctgttcttaacggtcttttagaagtcgtcgagcgagatgctattgctttgacttggttgcatgagttgcccttgcccagaatcgcggctagcgaggccggtgagttcccgccggaagcgctagccagttggaagtcatatagggattacggaatcgagacccatctctttgacgcaacgacggattttgggattccggtgatctttgcgctccagatatcggatcaggatgacgacatcgctcagctcgtaggagctgcatccgctttggaacccgctgaggcgctgactaaagtattcagggaaatggcatcgatccgaatagcactacgcgcctttctcgcccagtccacatcgattaagatttaccccgatgtggctaacgtgacagggggtgccgccctcatgggccagcgcgcgtaccgagatgcattttccttcctccttaacagcgagcgcgaaacgtcaccgtcgcggatgcctaacctcctagagctgaatgatgatccactgcgcgagatgattattcgaatacgcctggctggcgctgaagttatcgccgtcgatatcacgacggacgaagcgaggtcagttggtgcaagagtagtgaaggttttggtcccagaggcggttccactctcctttgttcaccgagagaggtatttagatactcctcggctcatatccgcgcctaatagcatgggatatttggttgacacagcgcctacgttcaaccggaacattcaaccttttgcgtgaaactcatatcaaggaaggccagaccgactaatggaccgcttcgttgtgactcggacgctcttcggcgtggagctcgctaaagaactccagtcctccatcttagaggatgggccatacataggcgactcagttcctcactggaaacaaaatcaattactcgtgtacgtgacgacagatgaggcatccccaaggttggactcaattgacggcggggcgttctcagctggccggccttggctccccgtccgtcttcgacccacagtgattcactgcggccccataatttggccaggtagtacgccttgcttccggtgcagtgtgaaccgaatgaagcagcactctcccatgcctagtctcgtaggttcaggaccggagcttgcggaaggctatgcggcgtttcatgtcagacttatagcggcagcgatctcgttgctggaggagagattctctgagggggagatcttaggtaggggcttatcatttaatcttgtcaacgggtttcttaaccactatcctatcgtgcccgttgatcgctgtccgagatgcggtggccgtttcggtaaacgggaagatgagcaccaagagttgggctgcgtcgcacgggaggtgtgtcaagtatgaagggtataatcagtggtgaacaggtgggaaatgcagctcgctttgacaagcagttcagggtccctcgtcggccgagcaggcggctcggtgtcgatattgagatccgtgaggacgcaacaattctttggggatcagatcgtctgcagacatttacaggaggaatgaaaccttcactgattgaggatattttacgagcgtgcgacggaactaagacggcacgtgagctcgcctctgtatgtgatgttacggagcccttgatggacaagatagtggcccttctctgggtctcgggtgctattgaggaggcgggcccgaccgatgttgaaagttctccgcttggggtccttttgtctcgccttgggaacgcaactggggcgaatgctagctggcaggaagctcagcacagaattaacagcatgccgatctgtgttatgccccattcggaacttggaacggaggttgcgggcgcgcttgctggcacctttgaggttatcaatgaagaggcagcttttgaacgcggcgtggttctattcatctttatcgaaaccgcgtcgtctaagatcgaacagcatcacaaatttgatgaactgacaaagagaagagtgctattggttagcgctgcgggtgacgaagttgtagtggggccgctttatgaccaggctataacgccctgccttcggtgctgttcgtcatcgaggatcaagctggatcggggtgcctcgagcccggcgcagcttcgtctcatggctggaattgtctcgcatcatattgttgcgttggtaagcagggcgttactctcaccgctgcccacggattccttggcgctgaatgtggtcactggtgtccagcgctactctttcccggtgtccagaccgggttgccccgaatgttcgcatgcgatcccagctattgctagtgagccgacggtcggtgccgtgtacgaggcttccgtagcactccctccgcgagaattcgtgaatgtaagggactatcaagcccacttcttgagcgcaaatcaacaacttcaaacgaaatttaagtcatggggaaaaagggaaaaattccctttgcctgacattaatatttcagacctacatatacagattgacgaccttctttttttagctgctgcccttaggtttgggttcggaatagacccggagcggaccacttcaaaaatagcgaagcgctggacggcctctggtggaaacattggctcggtaaacgcattcgtgagccttcctgcgatggtagggcacattcccagtgggatttatggatattcagttagcgatcattccctagccaaagttagtcaggagttgatttcggcgactgacatcatgattgcggcttctgccgacctacggaagatcgcttctaaatatgggacattcggcttgaggatcgcgattatggacgccgggtgtgccctttcaacggtgcgtcgtgtctgccgggaagtaggccgtacattttcgatgtggagcgctgacctcgacgctgggtctattagcgagatgctgcatctttcaagtgcgcgtgagcctattattggagtttcagtgctgggaaaggggcaacgagggtgaggacagacattcccgtaatgaatgccattctgtgtggaatttctggtttgaggccaagagttgcggagctccggctgaatcatgtaccaggagaacttgaaggtgacctgatcggcgagttctcggggccagttactccggatgaaggatcaccttgtctgccgtgcaagagcttccctgaattcttgcagacaaggaggtcggtatcccattttagagacgaggcggttgacgcacgctgcgtcatccatgcagtggctcaggctcttgaggatgatgagcgactgtgggggtgctcagagaccgctggtcttcttgaggcgtttgtctttgtgcttcgagatagtgttggcggtcctggacccgggatctatcaggtgcggcgcgattctgcggtgagaatgacaactgccgctgaacttggcgatccgattcgattcggtgttcaggaggaattcttcgcagggtcaggggtagttatcttttgcgcgaatctggacgtggaggatggcgccggaggagcaaacggatacttagttaatactctccgagcttccatggcactctacgaagtccatgttgaactcggttgcatggacgtggttggctccgttttcggaggcttcattccagcttcgctgcgatcgctcctgttggcagatatggttactcgtcagcaaatcatctcttgctcctatggttttccagcctaacttgctcgacccgccagtagctgggttgtgaattgggtaatgaatggatcgaaataatttgtaccatctgagtcgcgagaaggtaaatacaaatggaaatgaggcacttaatctcaatgtgatggagttctcggacatgattagcgacgctactgagcgcgacgacgtcactcagataatggcggcatcttgcgtcgagacgagtgtatcgtcgagttccacgtcatcttcatgatcgccaagtggcagattatggagccaggagaagaggtccgtacagggcgaatactcagacgcgacttagccttcgcagttgtcgtggaagtttatctagccgtcttaggttgtttcagcaaccctacacgggaagatactcttagcgctctggggtgggattatttggttcgccaaagcgattcaaggcttcctctctaggtggttatgattagtgtcgaaaccaattgaggggaggtgaacagaatggagaacgaaacgttggaccttgacgtgatggagctggccgatatcatcggtagtgcttctgatcaagacgacatggctcaggtcatggctgcgtcgtgcaccaccacgagtgtctcgacgagctcttcgtcgtcctcgtaacgagatgggcgggctggcgggtgcttttcgggcccgccggcccgttcctttgttatttacggttctttgcttgagcgggctgaatcgtggtggggaggttgtctaaaatttgggctcgggctcgaggccggccgcgtaaattgaccacaatgagcgtgctgcggtaacttagacgtaagatacgcttctcctgctagccttatttgttacccgtttggatttcacctagatgcacgctagggtaggctgattagcttttatggaaatgatattattattatgataattagtgtagatgggatttggaggggcatcgtgtagctagtctcaaatagaagcgatcccgcagtgcagcgtattttggatatgtccaggccttcgttcaagctggtttgatgtttttaaaggatgtggtgaccgttcacattgcgcatggctgccggtgtgcacattgttgagatgtattcggaggctggaaaggcagcggcttttttaattgacgcgtatgcaaccctgggggttccatatcgagaaatgtcatcattgttgttgtcgtaagtattcaaggtgggtaagcgccctgagattttcgctgttgatcgggtggcgcatgaggctaatgccggcgtaattgatccgaagctagatttggttgttttgaacagtttgcacaccgtcggtaatatgggggcgataatttagacctcctttgtgcttgactcaagggcttttgttctagtggacagaaacttgagctctatttccgataggagggttcttctggcttctcctagatacgtctttcttcttctggttctgagagctagtcgcgatgagcttcttgagttgtgcaccagtcgtcgggaactggtgaaattcttggcggatggctatgtggatatggcctttttctggtcttgagaccatccgatcacgatggtctagggaagcaaggataagggtgtgtcgataatttgattatcggatttccatctccgttagaattctgatgctggcggatgctaagtcattgaatgatgtgtctgtggcggtcggaattggactacatgagaggccgcagcgtgacttggagagcggatcttaggaatcagttcagggccaggactcccatccaggccatcagtttgttggcgaagctgacgatcagctgcccgatccagttctgtgtgaagccttttcaacgacagatcggtcaggctggtgtccttcgctgtc

SEQ ID NO: 60 - DNA, 11522 bp, Propionibacterium acnes
ggcccggctgttagacctgacactgggcagctccggaaccgtgtatggcgtctggctccagtaacgcggccaagcatagtggcagcaggtcgagatcaccgcgttggacccgtttcgcgattacaagcacgctatcgatgatcacctcgataacgccacagccgtactgagtcccttccacgtcgtgaaacttgccgcccaggccctcgacgaggcccgaagccgggtccaacaagcccctcaggcaaccgcggccggactggcgacccgctctacggcattcagacgatcctgcgagccggggccgagaacctgtccgacaagcaaaaacaccgtcttgccaccgcgatcgacgctaacgaggcacacgagaaaatgttcattacctggcacaagcagcgcaacggctccgggccgtcaacagaccgaccaaactctaccgcagcatcgcccgtggctccagcaactgcgacaactaccgcctactccgcctgctcatcgccgggggcaagacacacgaaccaccgccaagtcagacgagccatttatagcccaacagctatttgggtggtcccctcagcctgacagcgccagacgtcggtccgccatgttaaactgaacgcgtcgcttaagcttcgggaatagaaatgggaaacggtatgactcaaatacttattcaagtactcccggaatagacattcttgcggcgcgctcagctctaatcatttcgtggccgcctctcctacgacgaattgtgcattagggaagtacagtgcatctcagtccatatgtagtctttcgcaggacacgactcgcctactctcaacttcagagcagctccttcgacacactctggcagcaagtgcaagaaatggtcgataaacatacgcaattagaggttcagaccagcaggcttacggcacacctggagtctgttatttcagtaactgcgcctcgtgacagatctcgactaatcacattaaaacgtgacgtgcataacatgcgcgtggaaaaagtgcagcaaagactgctgcactgtcagggctgcacggctagcaacattatggagcctgtatctagttggatcgatacatgtcgatcatacaaatacttgagcgtcggttaagtcaagtatatgcggacagccgagacgaagtgtctcgtcactacaggtccctctaccaggctgacgcaatagagccaagcattcaactctcaggtggccagctccacagtgacctgacacgtctgattagccacgattctaggataaaacccactaaagagcggactatggaaacgactcttgtaaactatctctacagggcagcaacaaagccatcacctttcggtcgtttcgtggaagtaggggccttcgacccgtctcaaccaaattccgaacctcgacgctgcagcgaatccagcgtgacgacaaaccggattcttaccagctggctcactgcagtaacagcgcattctttcgccgcaccagaaatgcttgctatcctcaacagcgccctgcgcgttaaacgcgatataatccagttcattggaattccacctggggagtggcgaggtgcaccgagcattcccgaggagcgcctgctaactatccgcaagcgcgaagatatgatgtctgttcttaagctcctaatgggcggcccaagatcagtcggtgacctcattattgcccttaatgaccaaggcatagatgaatcacacgcaactaatcttctcagcagtttgagtacagcagggataatcttctttcggctcccagtagatgaccatgacgtacattatgtacagactgcgtgtacagcgctaaggttaaccaaagatgagtcacttcgtgccgctttctaaagtctggcgaacgctgaaaaggagttccccacagcgtcagtcgccacgcgtcacgaccttctcctcggcatcaaggattccgtgaacactgtcgcgacggcacatgatgtgccgaccccaccggacagcgcactcaggagccctttgtatgaggacctccccgccaccgcgacaccccagacatgggattcaaacacggttgagagatcagcccgcgcactcaggagcatctggctactgagcgatttaatggatagctctcaacgccgacagttgggcctctcccagttcatagcggacatgaataatggcgcgccagttacttttcttgatttcttcgactcgttttcgcgccttagcattcgcgagcgccaaggaatcctgcgcggagaaaactcaccgcgaatcgcccgtttcgctcagcaatatagtgatgcattgcttaaaattcgcgatgccgttaactacacgcagggcgaagcccaccttgaatctcaggtaattctcgatgcgatcaccaatattgatgatttccggccgactaagtcgatcacaattcgaggacaattcacaacatcgctcacctcccatataagccaactgataatcaacggtgttatgacgggatacggtacatacatgtcccgattcgcaacatttgtaaacccaacaggtacttggaacctagccgacgggattcggagacatctatccgatcattttccaggtcaatgtgatttgaattccgtactgggattcaacttcaatgttcatccgcaaatgacagcacatagtatcgcctatcctggagtagttcctgcgcttgatggcgccaagacacattcaattcaggatttaatactgattccaactgccgaagcaggtccacgccgcgtcgctatctttgatagagcagagaacgaaccgatcgacctccagcccatgaatttcatggttccttttggggtacctttgctgtatcggactctagagttcctgtgcccatcgaccagatacctatggaacccagctcaagaccttctggatatcccaatgatagagaacagttgccctcggatttactttgacgacgtagtggctcaacgccgttcctggacgtgcagcgccgagacgctcccgtgtcccccagagaaactctttaggggtgatcttgctgctttgcaagccttcgactcgtggagactgtcagcgagggtacctagacatgtctttgccctagtacaaacggctacggaaagacaaatattttccggagcggccgacgcgccaaccttgctctccgaatacaagcaccttcggagagcaagtgtgcataagccaatctacctggatctacgaaacccacttctagtccgttctctcgcgaaggtgatcatgtccaggcccgaactatatgtcacgttttccgagttcctcccatcggaggccgattacacgcagaacgggagccgccccagttacgcagaggagtacttcattgaactgtgtgccgagtgacagcgcaagcatgtctgatcccggcggctggcgggcgctccatattcacttgcctccctcggtgcagtctgagtacctagctgacgtgattcttccctcgatgtcagccttgatgccagaacatgactacttcttccttcgatattggcaggggggatcacatctccggcttcggctccgtagcactcccgagcaccccctagatgatgaggctatcaacgaggttgcatgccatctccgtagtcttctcccggcgttgtcagaccaaaagcgcgcggagtaccgctattcgcaatcgcttcaggatcagttagccgaaatggaaagggctgattgccttcccctagaggcggttgggaccgtggtagagcgccggtaccagcctgaatatagaaagtatggcggatcggtcggagtatccattgcagaggatgttttctgtagtactagccaatctgtccttcgcattctaaatgagcggccaattagccaccgacagcccttggggtatgcttgccaagttttcatccagatgctgggctgcttagggctcgcaacttcgcaggtcgaccagttcctcaccagatatgcgcagtggtggaccccttactcaatggccgctcgccctgagaccttagcggcgcgtctctacgccaacttgtcaagcgtggtggcggacctatgggccgcaagtgagcccaacggaatgttctcggttccggctctcaatgcttatacccaatggtcacggcgacggtcgtccgcgagaaataccagcgtaaagatagacccaatgtttctatcttgcttagcgaactacattcacacaaccaataaccgacttgggctcccacccgccctagaatcgacagcggcatatcttgtccaacttggattccgatcggtggctgtcagggaggagaaagtgcggtgaatccaaaaaactccaaagcgacggaactttggtttcagataattcagactcgccatgtactcttcttctcgacttatctcgggcctccaccgagggcactgagcctagtcctcaatactactgtcgaacttgggaccctacaacaaaagaccccggagtaagggttggcatacttgattccaaccgcttaactgatcaagcggctttccttggcggttccggtattacgcatcacttcttggtaatgaaaaaaccacccagctggccccttctatggaacgcgggtttcgcgggcttgaagctttccacgataagcaaacaattgttcaccgcgtcatatccatggatggtaaagtgggcgctacaggcatcggcttggacggacgacgaacgccttctggctcttacgaaacttctagttgcccacgctgatgcaagccttccaccggtcgataagactgaaatgctcggccgcctccctttgaagttgagcttgcgactgatcacatatcgttcccactacgaaagcatccgcgctcgcacgattgatccgaaagcgatggatactgcggttaatcgggccttcatgaagtatcaagacgagctccagcgatggtcccagtcgttgacatgctcgtcgagctatcgtgagaaagaatggactaatcccaacctttcagagtggagtgccatcatttattgccatctcccacaaattaggaaactcctcagcgggggaggattaactgtcgcgggcccgacacgcgaggatatagaagcctccttaggtcacagtattcctgatacacgatttcacgagcgccttgaccccgccatgcagtattatctcaatcatgaccaagacttcacggcatacagattctgtacgggttttttgtacagcaacctgtactcgctgggaataccgttgaggctgcgctaccttgtctgtgggctggcagcacgtttcaacgaggagctgtcgggcacgacgtggcgcgatttacgggatctcttccacgaggctgctactgtcgcatattacacacgcgacacagacgggagcgggattagataatgacagtcgagcgtcagcccctgcgggagcgtgcaaggagcctcgtttcaccatacggactagtttctcaagtataccccctgcatgccaatgaagcagatccaccgtttcatgtgcatttgggtcgaacaggccactcaatacacgaggggcaaattacttttgagggagatatcggaaacaccgacgaggcagggtcggggtccgacagtaccacggcagaatttattgcagtaatggagtccttagagcgctactccagcgcaatgtgggacgctcgttccttcttgctggaatcggaaaataatctgcaggagcgatttgtatctcccaaccaattcccacgctgttctacagccgagctagattctggacatgtactaaggcggtacgacccgggcgtcccaatacgatgggtcagaggatggtcactgacttcaggtcatcaggtgtgggttccggcgatcgcggtttatctgcatctgccgtacttaaacgactctgaacgattcatacgttcagtctcgaccggatgtgcggttcatgaatccatgcggaaggctgttcttaacggtcttttagaagtcgtcgagcgagatgctattgctttgacttggttgcatgagttgcccttgcccagaatcgcggctggcgagaccggtgagttcccgccggaagcgctagccggttggaagtcatatagggattacggaatcgagactcatctctttgacgcaacgacagattttgggattccggtgatctttgcgctccagacatcggatcaggatgacgacatcgcacagctcgtaggtgctgcatcagctttggaacccgctgaggcgctgactaaagtattcagggaaatggcatcgattcgaatagcactacgcgcctttctcgcccagtccacatcgattaagattgactccgatgtggctaacgtgacagggggtgctgccctcatgggccagcgcgcgtaccgagatgcattttccttcctccttaacagcgagcgcgaaacgtcaccgtcgcggatgcctaacctcctagagctgaatgatgatccactgcgcgagatgattattcgaatacgcctggctggcgctgaagttatcgcggtcgatatcacgacggatgaagcgaggtcagttggtgcaagagtagtgaaggttttggtcccagaggcggttccactctcctttgttcaccgagagaggtatttagatactcctcggctcatatccgcgcctaatagcatgggatatttggttgacacagcgcctacgttcaaccggaacatccaaccttttgcgtgaaactcatattaaggaaggccagaccgactaatggaccgcttcgttgtgactcggacgctcttcggcgtggagctcgctaaagaactccagtcctccatcttagaggatgggccatacataggcgactcagttcctcactggaaacaaaatcaattactcgtgtacgtgacgacagatgaggcatccccaaggttggactcaattgacggcggggcgttctcagctggccggccttggcttcccgtccgtcttcgacccacagtgattcactgcggccccataatttggccaggtagtacgccttgcttccggtgcagtgtgaaccgaatgaagcagcactctcccgtgcctagtctcgtaggttcagggccggaacttgcggaaggctatgcggcgtttcatgtcagacttatagcagcagcgatctcgttgctggaggagagattctctgagggggagatcttaggtaggggcttatcatttaatcttgtcaacgggtttcttaaccactatcctatcgtgcccgttgatcgctgtccgagatgcggtggccgtttcggtaaacgggaagatgagcaccaagagttgggctgcgtcgcacaggaggtgtgtcaagtatgaagggtataatcagtggtgaacaggtgggaaatgcagctcgctttgacaagcagttcagggtccctcgtcggcccagcaggcggctcggtgtcgatattgagatccgtgaggatacaacagttctttggggatcagatcgtctgcagacatttacaggtggaatgaaaccttcactgattgaggatattttacaagcgtgcgacggaactaagacggcacgtgagctcgcctctgtatgtgatgtcacggagcccttgatggacaagatagtggcccttctctgggtctcgggtgctattgaggaggcgggcccgtccgatgttgaaagttctccgcttggggtccttttgtcccgccttgggaacgcaactggggtgaatgccaactggcaggaagcgcagcgcagaattaacagcatgcagatctgtgttatgccccattcggaacttggaacggaggttgcgggcgcgcttgctggcacctttgaggttgtcagtgaagaggcagcttttgaacgcggcgtggttctattcatctttatcgaaaccgcgtcgtctaagatcgaacagcaccataaatttgatgaactgacaaagagaagagtgctattggttagcgctgcgggtgacgaaattgtagtggggccgctttatgaccagactataacgccctgccttcggtgctgttcatcatcgaggatcaagctggatcggggtccctcgagcccggcgcagcttcgtctcatggctggaattgtctcgcatcacgttgttgcgttggtaagtagggcgttactctcaccgctgcccacggattccttggcactgaatgtggtcactggtgtccagcgctactctcccccggtgtccagaccgggttgccccgaatgttcgcatgcgatcccagctattactagtgagccgacggtcggtgccgtgtacgaggcttccgtagcactccctccgcgagaattcgtgaatgtaagggactatcaagcccacttcttgagcgcaaatcaacaacttcaaacgaaatttaagtcatggggaaaagggaaaaattccctttgcctgacattaatatttcagacgtaaatacacaggttgacgaccttcttttttggccgctgtccttaggtttgggttcggaatagacccagagcggaccacttcaaaaatagcgaagcgctggacagcctctggcggaaacaattggctcggtaaacgcattcgttagccttcctgcgatggtaggacacattcccagtggggtttatggatattcagttagcgatcattccctagccagagttagtcaggagttgatttcggcgactgacatagtgatcgcggcttctgccgacctacggaagatcgtttctaaatatgggacatttggcttgaggatcgcgattatggacgccgggtgtgccctttcaacggtgcgtcgtgtctgccgggaagtaggccgtacattttcgatgtggagcgctgacctcgacgctgggtctattagcgagatgctgcatctttcaagtgcgcgtgagcctattattggagtttcagtgctgggaaaggggcaacgagggtgaggacagacattcccgtaatgaatgccgttctgtgtggaatttctggtttgaggccaagagttgcggagctccggctgaatcatgtgccaggagaacttgaaggtgacctgatcggcgagttctcgggtccagttactccggatgaagtatcaccgtgtctgccgtgcaagagcttccctgaattcttgcagacaaggaggtcggtatcccattttagagacgaggcggttgacgcacgctgcgtcatccatgcagtggctcagggtcttgaggatgatgagcgactgtgggggtgctcagagaccgctggtcttcttgaggcgtttgtctttgtgcttcgagatagcgttggcggtcctggaccggggatctatcaggtgcggcgcgattctgcggtgagaatgacaactgccgctgaacttggcgatacgattcgattcggtgttcaggaggaattcttcgcagggtcaggggtagtcgtcttttgcgcgaatctggacgtggaggatggcgccgaaggagcaaacggatacttagttaatactctccgagcttccatggcactctatgaagtccatgttgaactcggttgcatggacgtggttggctccgttttcggaggcttcattccggcttcgctgcgatcgcttctgttggcagatatggttactcgtcagcaaatcatctcttgctcctatggttttccagcctaacttgctcggcccgccagtagctgggttgtgaattgggtaatgaatggatcgaaataatttgtaccatctgagtcgtgagaagataaatacaaatgaaaatgaggcacttaatctcaatgtgatggagttctcggacatgattggcgacgctactgagcgtgacgacgtcactcagatgatggcggcatcttgcgtcgagacgagtgtatcgtcgagttccacgtcatcttcatgatcgtcaagtggcagattatgaagccaggagaagaggtccgtacagggcgaatactcagatgcgactgagccttcgcggttgtcgtggaagtttgtctagccgtcttaggttgtttcagcaaccctacacgggaaggtactcttagcgttctggggtgggattatttggttcgccaaagcgattcaaggcttcctctctaggtggttatgattagtgtcgaaaccaattgaggggaggtgaacagaatggagaacgaaacgttggaccttgacgtgatggagctggccgatatcatcggtagtgcttctgatcaagacgacatggctcaggtcatggctgcgtcatgcaccaccacgagtgtctcgacgagctcttcgtcgtcctcgtaaacgagataggcgggctggcgggtgcttttcgggcccgccggcccgttcctttgttatttacggttctttcttgagcgggctgaatcgtggtggggaggttgtctaaaatttgggctcgggctcgaggccggccgcgtaaattgaccacaaggagcgtgctgcgatagcctagatttaagataaacttttcctgctagccttgtttgttacccgtttggatttcacctagatgtacgctagggtaggctgactagcttttatggcaaagatattaccattatgataattggtgtagatgggatttagaggggcatcgtgtagctaatctcagatagaagcgatcctgcagtgtagtgcattattggatatgtccaggccttcgttcaagctggatttgatgctttttaaaggatatggtgaccgttcacattgcgcatggctgtcggtgtgcacattgttgagatgtattcggagactggaaaaggccgcggctttttcaattgatgcgtatgcgaccctgggggttccatatcgagaaatgtcatcattgttgttgtaagtattcaaggtgggtaagcgccctgagattttcgctgttgatcgggtggcgcatgaggctaatgccggcgtaatcgattcgaagctagatttggttgttttgaacagtgtgcacaccgtcggtaatatgggggctataatttagacctcctttgtgcttggtacaagggcttttgttctagtggacagaaacttgatctctattttcgataggagggttcttctggcctgtcccagatacgtctttcctcttctggttctgagagctagccgcgatgagcttcttgagttgtgcaccagtcgttgggaactggtgaaattctcggcggatagctatctggatatagccttgttctggtcttgagaccatccgatcacgatggtctagggaagcaatgataagggcgtgtcgataatttgattatcggatttccatctccgttagaattctgatgccggcggatgctaagtcattgaatgtgtctgtggcggtcggaattggactatatgagaggccgcagcgtgacttggagagcggatcttaggaatcagttcagggccaggactcccatccaggccatcagtttgttggcgaagttgacgatcagctgcccgatccagttctgtgtgaagccttttcaacgacaggtcggtcaggctggtgtccttcgctgcccagtgtcaggtctaacagccgggc

SEQ ID NO: 61 - DNA, 2881 bp, Propionibacterium acnes
gccccacctcaggcccgaagagccagacaactcttgttgaacttcaaagccttgaaatcttcggtctgctttttaatgctggtctctgccgggaatcgctcgatggaagacgcgccgtagaagcctacgatgccatcggtgtgatcgagaatgtattgcgcatcctcgggattggcgatggggccgccatggcatagacataggatgtcgggattgacagatttggcagcgtcggcaagttcttgaaccttgacagcggcgtcctcgatagtgagtgctgtttttgcaccaatggttcccgaggtcggcagacccatgtgggggacgaggatgtcagagcccgctcgggccatgtccttggcctggtcgacatcgaaaacatagggtgaggtgaggagatcaagatcgtgggcaattttgatcatgtcaatctccaaaccgtaccccatgccagtttcctcaaggtctgcgcggaatgtgccgtcgatgagaccaacggtagggaagttctgaactccggcgaaccccgcgtccttgatctgggttaggaactgaggcatcaccctgaaaggatctgtgccattgactccggcaagaactggggtgtgcttgacgatgggcagcacctcgcgcgccatgtccatgacgatctcattagcatcgccgtaagcgagaagtcccgagagggagccacggcctgccatccggaaacgtcctgagttatagatgacgagcagatcgataccgccggcttccgcggatttagccgtaatcccggtgcctgcgccgccacccaccagggggattccgttggagacctgttcgcggaactttttcaggatttcagtgcgggtcatgatgctattcctttccgattagttatggatgatgagctcgtgaagagcccgcgccattgcttcgccaaaaccagtatcattgatattttgttttcgctcagtcacagtgatgtcggtatccttcagtccctctcgaatggcgttgaacaaagcgtcatcggcttctggatcatagaaatcttcacctggggtatctattccggagaccccagagtaggaatgaaaacttgagtcgggtcgcgcgcagcggccgcctttatggcgattctgtgaccaagctcggccatttcggtgtcgctcgttcgcatgagcgtcaccgctggattgtggatatgcaacgtgcgagaggaatagcgctccggaacagtgtcgacagggccgaaattgaccatgtcaagcgcgccaagactgatgacttcgggtattccaaggtctgctgcggcttccatccggcggggtcctgccgagagaactcctccgcagaggtcgtcggcaagctcggtagtcgtcaggtcacatattcccgcgagtagcccagatgatgcgagcttttccatcgccttcccaccggaaccagttgcgtggaagacgagaacctcgtacccaaggtctgtcaacgtcctgcgggcttcgtccgcagcgggtgttgtcaatccggtcatcgtcaggccgatgaccggtttgttgtgagcggtgttgctgacgattccagcgtcttcgtaccctttggccatggctgcgatagcggcggctgcattggcgaagaccatgcgcgacacggaattgatgccggccacgtcaacgacggagtacataagtgtgacgtcggcctgtcccacataggggctgacatccccggaagccatggtggaaaccaggagcttggggaatccaatcggcaatgcctgcatgaccgaagccgctacggatgatccacctgatccgccgagggacaggaggccgtggattctcccttcttcagcaagcctggatgcaataaccgatgcgccacggcccatgacatccatcatttcgccacggttatagcgtgttcggatgtcacttggcgactcgcctgcggcacgaatgacctcatcggaagtgtagtcggctatgcggctgttggagaatgaaccaacatcgatgatgactaccttgccgccgttggtaagaatgcggtgacgaagccagtcgagctcgtctccctcggtatccaaggttccgagacagcaattgcggccatgaacactccttcgtgatcatgtcatcatgaccgtagttcggtgattctgcctgcaccatgctgcttgagacgaattggcctatatggttgtaccgctggttgcgaagaagggcaatacttcaggtgtggttgtcaaggttgaccctgcaagtctgagccggatgctggggggccagcccggagaagcgcttccggaagcgttggcggacgcattgctggatctcattgacgctggttttctgcccgctggtgcggttcttccaccccaacgagcatgtgccgcgacactgcaagtatctcggcaaaccgtggcggaggcatttgggattcttgaagccgcaggccacattgcggcgttggttgggtcagggacgcgggttagatcaggccgcgctgcagtgagtactgatggcaggttgttctcgttcagtgaggctgcacctggcctgatcgacctgtcaacgggggcgctacctgcgtcagaggtggtgcgaagagtgctgctagaagaccacgtcgacttggatgagtatttcgataccgacggatatttcccggctggactacctatattgcgtgcggctatcgcggaacggctcactcgtgatggagttcccacagtcctgcagcagatcgttgttaccaacggcgctcagcatgcgagttatcttgcctctcagctcctggtctcggctggtgacaccgtgttggtggaggagacgacatatcggggtgagctcgcagagctgcgactgctgggcgcccgtgtggagagtgtccc

SEQ ID NO: 62 - DNA, 10252 bp, Propionibacterium acnes
cccgctcactgccaacgagacatcacgcagcagcggccgaccatcggccagcgtgtacgtcaccgacgcgacatcgagacgaaccatgacccaaaagtatcacacgtgtgataaatggaggttgagtatggcggcctgttcacttgatcaggcatttcttttagtgaggcctggggcgtaaccacttgtctgcaccttagagctgccacgcctcttgcagatcgaggcagaggaggctgcgcgggggtcgtggcgtgcggtggcggggtttgatgtcacgttcagtgtgccgaagtcggcatcggtgttgtgggcggttgcggacgcggggacgcaggcgttgattgcgcaggcccatcatgagacggttgtggcggtggttgcattcatggagtgcgaggttgcagccatccgcacgggtgcaactgctggggatggcgcggttgcacaggtcgacgtgacgggtttgatcacttcgattcccgcgccggggacccgcacttgcatacgcatgtggtgatcagcaacaaggcccgcacggtcctggatgggaagtggcggagtttggatgggcgttcgatgcatgccgcggtcttggcgctgtcggagctgcacgaggccgtgttcgccgatcacatgacccgcacgttcggtgtgacgtaggagccgcgggagatgggccaggaccggaacccgtcgtgggcgatcaccgacgtccccgaacagctggtggcagagttctcgacccgcgcccggcacatcaacgaggcgaccgacgcgctggttgctgactacgtggcccagcacgggaagcgcccttcgccggcgaccatcatgaaactgcgcgcccaggccacgctcgcgacccgtccggagaagcaggtccgctcacttgcggagctaacagccgagtggcgcactcgtgtcagccagcagctcggtgtggatgccaccgtgtgggcgcggaccgtcacgggtggggagcggcagttgctgttgcgggctggtgatgtgccgttggatctgatcgaggggtggggcggtctgtagtcgagatggtcggtgagaagcgttcgacgtggcggtgctggaacctgatggccgaagtcgcctgccagactgtggggtggcgtttcgccaccgttgaggaccgcgaagtcatcaccgcgatggttgccgacgcagcggaacaggcgtccttacgcctgaccccacccgagctagcgaccagcccggcgaagttccgccgcccggacggcactagcgtatttcgtccgaagcactccacggtgttctcctccgacagcctcctggccgcagaggaccacctcctgcaacgggcccgcaccgcgaccggtccgactatcgacctgaccaccgtggggaccatcacgagcaaggcggacagcgagggtcgggtgctcggtcccgatcaggccgcagctttggcgtcggtcgcggtcccgggccgggtggtggatgtgttggtggggccggcgggggctgggaagactgcagcgatgaacgcaccgcgccgggcgtgggagacggagcatggtgccgggtcggtggtggggttggctccgtcggcggtggcggcccaggtgctggccgatgatctgaggattgccacggagaacacggcgaagtggtggaccacccaccaacacaccggcgtcactttcaaggctggtcagctggtcatcatcgacgaagcttccctcgctgagaccctctctttgaatcggatcacgctggctgctgaggaggcggggacgaaggtgctgctggttggcgactatgcccagctcccgtccgtcgatgccggtggtgcgttcagcctgttgatccacgaccgccacgatgcccccgagctggtcgatgtccaccgcttcacccacgcctgggagaagaccgcatccctggagctgcggcacggccgcaccccggtcatcgacacctacctggcacaggatcgcatccacgacggagacgccgaggccgtgaccgctgccgcttacaccgcctggcgccacgaccggcagcaggggttggcgtcagtactgatcgccgaaacccgcgagaacgtcaccgccctcaacatccacacccgcgctgacctcatcctggacagcacgttgaagcctggccccgaaatcaccctgtccgacgggtccatggcaggcgtgggtgacacgatcatcacccgccgtaacgaccggcggctgcggaaccggcacggctgggtccacaacggccaaacctggaccatcactgccgtgcgtgacgatgggtcggtcacgatccgcccacccagtgcccggttcggcaacagcatcgtcctacccgccgactacgtggctgagcacgtcgacctcggctacgccgtcaccgctcaccgcgcccaaagcatcacaccgacaccgcccacgtcctcgtcgaacccacggcgacgcgggaaacctgtatgtggctatgacgcgcgggcgcgaatcgaaccgggcctacgtcatcctcgaccgtgccgacgaccacgccgccggcgccgtgtgccgtgtgaactcggtcgacagccccggacgctgggtcgcgcggtccgtgatgagttcgtcgacgtcggcagcggaggtaaccaggcgtgcgtggccggtacggagcagctcgtgcgcaccacggctggtgacaggccccggcaccgcaccgacctggcgtccgagctggtgggcctcggacgctacccgaagcgcccccgatcgcgcgccggcctcaacgaccaccgttgctgctgacattgcctccaaacagtcgggagcgggctaggagccgatgccgcgtcgacacggatccgggaggaagctcgctggccagcgcactcacatcacccacccggtccagcaagtcacggtggccgctcgggtcggggcggttcacgccaccgccaacaccgcacggtgcacagcagcctcgacaccattaagcgtcaccagccaccagtacacgctcacggttcgcgaggtcgccagccagctcggcggcgacatgctccccatacgcggaagccgcccgagaacccgtgaccgtcaccagatcgttccacggtcgcgccaagaacgacgccgcgccccgcacgaacagaataaacggagcgcggtcgcccagatcatccagcgcctgtggccagtgcgcgtcacccggaatcagagtggcgatcccgctctcctcgaccatgcgcagccgctgggcgagcccatccagcctgcccggtgaggtgaggtggtcacgccacacctgaccatcaactcgactcagaccaggcacggtggtcgtgtcggtgtcaagcagcccgagcgtctcaacggcacccaggcggcgcatcagcccgcccgtgacgggatcatcaggctccgccaacagcgccagcaccacccgggcacgacgttcatcaacaccaagcccagcaacaccagacatgacggctcctcctcgaacagacttcgccgaacaggtgcgccaacgcagcccgcaggtgtcgcgacgtcctcagcccgtggaggctggcgaacgcggtaacattcgacagtcgcacggttcggcagctcgacacagcagcgtgctggtgttgctttggaggagtccacgggcctcgccccccacaacggtgacttcaatcgacattgtcgttgttggtgatcgaggtgtcaccgcagctgcgaacgatagtcttgatctggacaacgatttcgatgcggaggaaagcacatgaggctcacacgcttcaaggtcgagaaccataggcggttggccgacctcgacattgaggtgcgcgaccaccttgtgctggttggagccaacgacgttgggaagtcctcgctgctccggtgcctcgatttgctgctcggggcgagtacggcgcagctctactcccgtatttcggccgacgatttccgagcccccgaccaaccgttcgtgattgaagggactctcgcggacttcaccgatgtcgacaaggctctgtttcccgatgagatccacgtcgacccgaacacgaatccttcgcgtctggtgattaggctcacggcgactgtggatgagaacgagacggtggtgatcagtcgttcggcccccgagggcggaacaggacgccagctctcacgggatcaggtgcttggcctgggatggaagttcctcagcgcaaccgcccagacccgcgaccttcgggaagaccgaaagtcggcactcgacgacatccttcaagctgtcgacttgggtgaagaggaggccgcgttcgaagccatcgcaaagagcctgacgaccaccttgggtagctctaaggtgcttgaaggcctccgaggttcacttgctgaccagctgtcgaaggctctgccggacaaggtggcacaggatgacttggcgttcgtgcctggagctgctgccgacaatgacgtcctcagcgacgtgcggctgcaagtcagcaagcaaggcgtggcacccgatctttccgaacagtcagacggcacgcgagcgctctacgcgatcgccctctacgatctgatgagcgtcggcgctaacatggtggggattgacgagcccgagatccatctacacccgagcagtcagcgaagcctcgcgcgcctcctgcggtcgaacgccaaccagaaggtcatcgctacgcattctgccgacatcgtaggagccttcgatccagattctattgtcgttgtgcggggcggaggcgaagccgttcaacccaaggctggattcctgtcggacgatgagcgaatggcagtacgcctgtgggtgagggatcggctcgaaccactcactgcacgtcgtgtcgttgtcgtggaaggcatctcagatcggatcatcctggagcacctggccgacctcaccgaccgaaatctcgaccggctcggcgtgtccttgattgaggctggcgggtgtggcgacatggggccgctcgacaagctctttggtgccaatggcttccgtgtatccatgtcgcaactcatcgatgcagatgcagaagaggcattggcaaagaaactgggagtcgaagttgctgaccttgcaggccgatccgtctgggtctcgcgaagcgacctcgaagacgagtacgttcgtgcgctcggctcggacgccgtgtggacagcactccagtcaaatggccacttctcgaagaatgaacttggcaactgcgcagcaagtgggccggctggcacgcgtaccgagatagatgttgctgccttctgtcgacgaaaggcgtacaaagtaaatgccgcgctatcagtcctgccgctcttcacggcggcgaatgccacgcaggtgtcgtctatcgagagtctactcgaagagatcgtggcgtagatggtcagcccgactcagaagcagattgacattagggacacgcgggttctcgatcttcttgtcgttgctcctgcgggatgcggcaagacggaagcgcttgcattacgaatccaaggacttcttcaccgcggcgatgtgactgccccaaagaagatcttggtgacaacattctcgaaccgagcccgcgacaacatcagagaacgattggggtcctacctgacgccttcggtaatgcgcgaccgcgttactgttgtgaactttcatggactggcagcccggttgatcagagcgcacggaaatgttatcggcctaagtgaggaactacgccttccggagaacgactgggttggcgagcaactccgccaacgcaacacctcctggaatgaccgaggagcgatccagaatgcgcttcgtgagacaaagcaacaacctttcagcgacgcagcggtcgaagctgaacttgaacgactcggaaatgtcactgcacttgaactggaacggctcagaaaggaagaaggacgcctcacctatgatgatctgccaagacttgccgagctgattctcggttacgagagcgtcgcggacctctacgcgacacacttcggcgctgtcgtggttgacgaattccaagacctgactccccagcaactccgaatcgtaaacagaatcggttacaagcgcacaacctatggcggtgaccttgtgcaggggatctatggttttgcaggagcgcagccactggcaattgatcgggacatacgtgccgagtgcacctgcgtgatcgagttctctgagtcgcatcgatcctcaccggcagttctcaggacggtcaacgcccttatcccgatcacgtcgggacaggtactcaccgcagccaaccccgactcctggccttcgggcgggctcaccgggacgatcgtgcaccaatcggcggaatcggaagctaagtgtatcgtgaaaattgcgcgagccatcctcggcagggctcccgggcatcggattggagtgttatcccgaacagcgccgcgtcgccgattcgttgacgcagccttcgccgcggcaacagatatacctcactacaggtgggatgacggcgtgttggacacagatactgccaaactcgtaaaggcaatgctcgcgaggtttgatgtcgccgcctacactgccgcgcccgacaaagtaactttccttcggatggcggttgactttgactcgatcactgatgtcgacacgcgcaagagcatggcggatgctctcggttgggtacaagatctgctgtctaaagcggtgaagccagagagcatccgtggacgcatcaaggttggcgattcagcgaccctcatcactagccctggagtccatctactgcgcggacacgtcggcaaagggcaacagttcgactgggtgattgtcgtaggccttgaaaagggctccattccgttcactatggctgacacatcagacgacgagatcgctgaggaagcacgagtgctttccgtgatgatctcacgcgctcggcacggcgtcattcttagccgagccaactcggttcggacgaacggggggcaccccatgagtcgaactccatcccagttcctcgaatggattgccactgccaatccactcgatgcgactgggatcatcgagtggttcaaagctgcggactggcgtgtaatcagtgagagatgaccaacgttctttggagagaagtgcgctgtccttgatgatgatccacctccgacccgcgcaaccttgggcgccggactcaccaggttgcagatcggatcagactggtaagcaagcgcccgtaaacctcgacttccctgaacacgggcccaggtcctattgaccccgttcagagagcacgagttcgtccagtcgcgctgcgcacccgatcccacgtcgtcagaaggtgagcggtagccagccagggtcatttacaaagcgctcagcgcgatctacagtagatagtaaggcaggttctcgtctcttgcgggtccatcgggacggcctacgggcgctcttccacgtactgtttcctcgacggagtagcacgtgtgacgagagagcccgatcatgttccgaaccatctggacgctcagcattcatgtcgatgactgtcttccagcactacatgccgagcaaccggctgctggcagctacgcgaactcggcgaggtgtgaagtggggtgtctcggcaatgctcgtcggcgtcccgtatctcgccatcgccaacgtgttcaactaccctgactgaccgttctgtggtgacgtgcaacggggtatcgatgttggtgtgcgcgaggacgttggttgtgggctcgttgtcgggtgcgtaggcggcgttctcgtcgttgtcaatagtgatgcgggtggatagggcacggttgaggattcgccgctcggctggcacgtacgttctcgactgtggccacggttagggcgaggtgtgctccaacggtgtcaacccctgggccaatgtgttgatgaggtcacggtgacgagtatgtggtcatggccgcacactccagattgatccggcaggcttccagggtggtgaacctcgttgaggggtccagctaagtacctaaggtcatggccaagcacgatcgcattcgctttgccgtgtgctctctttcggatcatcccggggagcacacaagatcgcccgaacaatggcgatcttgtgtacagtgactttgctagagatgttttcccaggaccgacagtgactgccagtgcgatgttcgaggtagtggtgaaactacgggtgtacaagatctgggtggccgtaaacgaggttgcctcttgggctcaggtcctgcctgacggaacccccctatctgagccctggccatgacgggtatgccttagtcaacgtggctgaagtgtcctgatatcgcagcatcagtgactagtttggtaactgtaatgccgccgcacccgttttacttactttcgatagaaagcgggtactctgtgcactttgcagggtttttgccttcgttgcttcccgtgcgacttactgtgtcttcttccttggggaggtgtaggggagggtagaatgttcgtggactagatcaacttaaccaacttacgggttgtaggttaacacctatctgtcaaccttgacactgtaatcccattgttcagcaggcacactgtcatacatctcactatctgtaaatgcagagcctgtggtttcaccaccaaagcctaactgccttaaatgtgcaatcccgttctgtgctccctccaaatcgatccgctccagtgtttcatcagcttcagaagcatagaggaacgtcacgctaacctacgatttggttctgggttgaatttttaggcgatctgatctgaagtttcgcgcgcctgcatagcccgatccgcaatctcgtccagcccgctgattatgtgatgcagctcacaagtagttagtaacaggacctgctccgcggcctggcctctatcggtgatcagcatgtgtccacggcatcttatccaccacgatgtcgcaatagttgcactgattctgacggcaccgccaacattcggtaagtgtaggataggacaagccttgagagtgtggatggaatgtgccaactctctcagtcctcaaagcatcagtggctagatcaacaaacatcgtaaacaggttgttctctcttatagcgatgtgtctatcgaagcagatgaacgagtcatctgccaggtatgaatgattgccatcactagtaacctctgcgtacggcagcaagacgttactgatgtttgagattaggagatccccaaaaatagatactcggagcgaaatagtatctatacctacgatgatgccgtgaacactactggtttctcaagcaaccagatccgcacatttaaaccatgtgaaacgtccggtaaacattctgctgtaagtcacccaggtgaccccttggagaaagttatttcagggctatggggctcgggggtgcgagaggattgttcgttgctcatttcggattatctttcagagatgagcaaccgcaatcggcattgaccagaagcgggtaaccggttgaccctagacagacttatgtttggtattcgtcaagcccccatcgggcgactggaacctgatcaattagatgatttgattgctattcttagaagaatagtttcctagattttatagcacttcccctaaacgtctaagtatgccctaaatcgtagctctaatgcagatgggcgggcgaggacgttccgggaagcatcgtcaagagtgtcgatgtcgcctgctctagctaagactcgctgcctaggaaaatcctgaacccaagtggctcggtattcgggggtgtagttcctggcgctatcggtgatgtccatagcagtcttggcggcggacgtgttcgttaagtcaataggactccagctggttttgtactcgtaatcttcaagatcaacatcgattcttagctcagtattgaggatctcgatcatgaaactcgaatcagagggaaaacttaactatcatatgcaatatcttcttaagaagagcgcttgccgactacgttatcaagcgatcccacgagcaccaatctggtatcggtaaaagtgttcgcttttctcggcggaaaatccccaaaatgcttggatatttttcttgacggatgaacttggagaagcgctgttctaatgcggcgtcacgccagacagtgtgcgcccggcatcgcccaagcctgagtgtccgaaacatgcttgatgcgtgtgaagcgttcctgcgaccaaggctcagcttgctggggatgctctaattacttctgctgctcgatagtatgcgtcctaggatagacgttgacttgagttgaggttgtctggctcttcgggcctgaggtggggcagc

SEQ ID NO: 63 - DNA, 10217 bp, Propionibacterium acnes
cccgctcactgccaacgagacatcacgcagcagcggccgaccatcggccagcgtgtacgtcaccgacgcgacatcgagacgaaccatgacccaaaagtatcacacgtgtgataaatggaggttgagtatggcggcctgttcacttgatcaggcatttcttttagtgaggcctggggcgtaaccacttgtctgcaccttagagctgccacgcctcttgcagatcgaggcagaggaggctgcgcgggggtcgtggcgtgcggtggcggggtttgatgtcacgttcagtgtgccgaagtcggcatcggtgttgtgggcggttgcggacgcggggacgcaggcgttgattgcgcaggcccatcatgagacggttgtggcggtggttgcattcatggagtgcgaggttgcagccatccgcacgggtgcaactgctggggatggcgcggttgcacaggtcgacgtgacgggtttgatcacttcgattcccgcgccggggacccgcacttgcatacgcatgtggtgatcagcaacaaggcccgcacggtcctggatgggaagtggcggagtttggatgggcgttcgatgcatgccgcggtcttggcgctgtcggagctgcacgaggccgtgttcgccgatcacatgacccgcacgttcggtgtgacgtaggagccgcgggagatgggccaggaccggaacccgtcgtgggcgatcaccgacgtccccgaacagctggtggcagagttctcgacccgcgcccggcacatcaacgaggcgaccgacgcgctggttgctgactacgtggcccagcacgggaagcgcccttcgccggcgaccatcatgaaactgcgcgcccaggccacgctcgcgacccgtccggagaagcaggtccgctcacttgcggagctaacagccgagtggcgcactcgtgtcagccagcagctcggtgtggatgccaccgtgtgggcgcggaccgtcacgggtggggagcggcagttgctgttgcgggctggtgatgtgccgttggatctgatcgaggggtggggcggtctgtagtcgagatggtcggtgagaagcgttcgacgtggcggtgctggaacctgatggccgaagtcgcctgccagactgtggggtggcgtttcgccaccgttgaggaccgcgaagtcatcaccgcgatggttgccgacgcagcggaacaggcgtccttacgcctgaccccacccgagctagcgaccagcccggcgaagttccgccgcccggacggcactagcgtatttcgtccgaagcactccacggtgttctcctccgacagcctcctggccgcagaggaccacctcctgcaacgggcccgcaccgcgaccggtccgactatcgacctgaccaccgtggggaccatcacgagcaaggcggacagcgagggtcgggtgctcggtcccgatcaggccgcagctttggcgtcggtcgcggtcccgggccgggtggtggatgtgttggtggggccggcgggggctgggaagacggcagcgatgaacgcaccgcgccgggcgtgggagacggagcatggtgccgggtcggtggtggggttggctccgtcggcggtggcggcccaggtgctggccgatgatctgaggattgccacggagaacacggcgaagtggtggaccacccaccaacacaccggcgtcactttcaaggctggtcagctggtcatcatcgacgaagcttccctcgctgagaccctctctttgaatcggatcacgctggctgctgaggaggcggggacgaaggtgctgctggttggcgactatgcccagctcccgtccgtcgatgccggtggtgcgttcagcctgttgatccacgaccgccacgatgcccccgagctggtcgatgtccaccgcttcacccacgcctgggagaagaccgcatccctggagctgcggcacggccgcaccccggtcatcgacacctacctggcacaggatcgcatccacgacggagacgccgaggccgtgaccgctgccgcttacaccgcctggcgccacgaccggcagcaggggttggcgtcagtactgatcgccgaaacccgcgagaacgtcaccgccctcaacatccacacccgcgctgacctcatcctggacagcacgttgaagcctggccccgaaatcaccctgtccgacgggtccatggcaggcgtgggtgacacgatcatcacccgccgtaacgaccggcggctgcggaaccggcacggctgggtccacaacggccaaacctggaccatcactgccgtgcgtgacgatgggtcggtcacgatccgcccacccagtgcccggttcggcaacagcatcgtcctacccgccgactacgtggctgagcacgtcgacctcggctacgccgtcaccgctcaccgcgcccaaagcatcacaccgacaccgcccacgtcctcgtcgaacccacggcgacgcgggaaacctgtatgtggctatgacgcgcgggcgcgaatcgaaccgggcctacgtcatcctcgaccgtgccgacgaccacgccgccggcgccgtgtgccgtgtgaactcggtcgacagccccggacgctgggtcgcgcggtccgtgatgagttcgtcgacgtcggcagcggaggtgaccaggcgtgcgtggccggtacggagcagctcgtgcgcaccacggctggtgacaggccccggcaccgcaccgacctggcgtccgagctggtgggcctcggacgctacccgaagcgcccccgatcgcgcgccggcctcaacgaccaccgttgctgctgacattgcctccaagcagtcgggagcgggctaggagccgatgccgcgtcgacacggatccgggaggaagctcgctggccagcgcactcacatcacccacccggtccagcaagtcacggtggccgctcgggtcggggcggttcacgccaccgccaacaccgcacggtgcacagcagcctcgacaccattaagcgtcaccagccaccagtacacgctcacggttcgcgaggtcgccagccagctcggcggcgacatgctccccatacgcggaagccgcccgagaacccgtgaccgtcaccagatcgttccacggtcgcgccaagaacgacgccgcgccccgcacgaacagaataaacggagcgcggtcgcccagatcatccagcgcctgtggccagtgcgcgtcacccggaatcagagtggcgatcccgctctcctcgaccatgcgcagccgctgggcgagcccatccagcctgcccggtgaggtgaggtggtcacgccacacctgaccatcaactcgactcagaccaggcacggtggtcgtgtcggtgtcaagcagcccgagcgtctcaacggcacccaggcggcgcatcagcccgcccgtgacgggatcatcaggctccgccaacagcgccagcaccacccgggcacgacgttcatcaacaccaagcccagcaacaccagacatgacggctcctcctcgaacagacttcgccgaacaggtgcgccaacgcagcccgcaggtgtcgcgacgtcctcagcccgtggaggctggcgaacgcggtaacattcgacagtcgcacggttcggcagctcgacacagcagcgtgctggtgttgctttggaggagtccacgggcctcgccccccacaacggtgacttcaatcgacattgtcgttgttggtgatcgaagtgtcaccgcagctgcgaacgatagtcttgatctggacaacgatttcgatgcggaggaaagcacatgaggctcacacgcttcaaggtcgagaaccataggcggttggccgacctcgacattgaggtgcgcgaccaccttgtgctggttggagccaacgacgttgggaagtcctcgctgctccggtgcctcgatttgctgctcggggcgagtacggcgcagctctactcccgtatttcggccgacgatttccgagcccccgaccaaccgttcgtgattgaagggactctcgcggacttcaccgatgtcgacaaggctctgtttcccgatgagatccacgtcgacccgaacacgaatccttcgcgtctggtgattaggctcacggcgactgtggatgagaacgagacggtggtgatcagtcgttcggcccccgagggcggaacaggacgccagctctcacgggatcaggtgcttggcctgggatggaagttcctcagcgcaaccgcccagacccgcgaccttcgggaagaccgaaagtcggcactcgacgacatccttcaagctgtcgacttgggtgaagagaaggccgcgttcgaagccatcgcaaagagcctgacgaccaccttgggtagctctaaggtgcttgaaggcctccgaggttcacttgctgaccagctgtcgaaggctctgccggacaaggtggcacaggatgacttggcgttcgtgcctggagctgctgccgacaatgacgtcctcagcgacgtgcggctgcaagtcagcaagcaaggcgtggcacacgatctttccgaacagtcagacggcacgcgagcgctctacgcgatcgccctctacgatctgatgagcgtcggcgctaacatggtggggattgacgagcccgagatccatctacacccgagcagtcagcgaagcctcgcgcgcctcctgcggtcgaacgccaaccagaaggtcatcgctacgcattctgccgacatcgtaggagccttcgatccagattctattgtcgttgtgcggggcggaggcgaagccgttcaacccaaggctggattcctgtcggacgatgagcgaatggcagtacgcctgtgggtgagggatcggctcgaaccactcactgcacgtcgtgtcgttgtcgtggaaggcatctcagatcggatcatcctggagcacctggccgacctcaccgaccgaaatctcgaccggctcggcgtgtccttgattgaggctggcgggtgtggcgacatggggccgctcgacaagctctttggtgccaatggcttccgtgtatccatgtcgcaactcatcgatgcagatgcagaagaggcattggcaaagaaactgggagtcgaagttgctgaccttgcaggccgatccgtctgggtctcgcgaagcgacctcgaagacgagtacgttcgtgcgctcggctcggacgccgtgtggacagcactccagtcaaatggccacttctcgaagaatgaacttggcaactgcgcagcaagtgggccggctggcacgcgtaccgagatagatgttgctgccttctgtcgacgaaaggcgtacaaagtaaatgccgcgctatcagtcctgccgctcttcacggcggcgaatgccacgcaggtgtcgtctatcgagagtctactcgaagagatcgtggcgtagatggtcagcccgactcagaagcagattgacattagggacacgcgggttctcgatcttcttgtcgttgctcctgcgggatgcggcaagacggaagcgcttgcattacgaatccaaggacttcttcaccgcggcgatgtgactgccccaaagaagatcttggtgacaacattctcgaaccgagcccgcgacaacatcagagaacgattggggtcctacctgacgccttcggtaatgcgcgaccgcgttactgttgtgaactttcatggactggcagcccggttgatcagagcgcacggaaatgttatcggcctaagtgaggaactacgccttccggagaacgactgggttggcgagcaactccgccaacgcaacaccccctggaatgaccgaggagcgatccagaatgcgcttcgtgagacaaagcaacaacctttcagcgacgcagcggtcgaagctgaacttgaacgactcggaaatgtcactgcacttgaactggaacggctcagaaaggaagaaggacgcctcacctatgatgatctgccaagacttgccgagctgattctcggttacgagagcgtcgcggacctctacgcgacacacttcggcgctgtcgtggttgacgaattccaagatctgactccccagcaactccgaatcgtaaacagaatcggttacaagcgcacaacctatggcggtgaccttgtgcaggggatctatggttttgcaggagcgcagccactggcaattgatcgggacatacgtgccgagtgcacctgcgtgatcgagttctctgagtcgcatcgatcctcaccggcagttctcaggacggtcaacgcccttatcccgatcacgtcgggacaggtactcaccgcagccaaccccgactcctggccttcgggcgggctcaccgggacgatcgtgcaccaatcggcggaatcggaagctaagtgtatcgtgaaaattgcgcgagccatcctcggcagggctcccgggcatcggattggagtgttatcccgaacagcgccgcgtcgccgattcgttgacgcagccttcgccgcggcaacagatatacctcactacaggtgggatgacggcgtgttggacacagatactgccaaactcgtaaaggcaatgctcgcgaggtttgatgtcgccgcctacactgccgcgcccgacaaagtaactttccttcggatggcggttgactttgactcgatcactgatgtcgacacgcgcaagagcatggcggatgctctcggttgggtacaagatctgctgtctaaagcggtgaagccagagagcatccgtggacgcatcaaggttggcgattcagcgaccctcatgactagccctggagtccatctactgagcggacacgtcggcaaagggcaacagttcgactgggtgattgtcgtaggccttgaaaagggctccattccgttcactatggctgacacatcagacgacgagatcgctgaggaagcacgagtgctttccgtgatgatctcacgcgctcggcacggcgtcattcttagccgagccaactcggttcggacgaacggggggcaccccatgagtcgaactccatcccagttcctcgagtggattgccactgccaatccactcgatgcgactgggatcatcgagtggttcaaagctgcggactggcgtgtaatcagtgagagatgaccaacgttctttggagagaagtgcgctgtccttgatgatgatccacctccgacccgcgcaaccttgggcgccggactcaccaggttgcagatcggatcagactggtaagcaagcgcccgtaaacctcgacttccctgaacacgggcccaggtcctattgaccccgttcagagagcacgagttcgtccagtcgcgctgcgcacccgatcccacgtcgtcagaaggtgagcggtagccagccagggtcatttacaaagcgctcagcgcgatctacagtagatagtaaggcaggttctcgtctcttgcgggtccatcgggacggcctacgggcgctcttccacgtactgtttcctcgacggagtagcacgtgtgacgagagagcccgatcatgttccgaaccatctggacgctcagcattcatgtcgatgactgtcttccagcactacatgccgagcaaccggctgctggcagctacgcgaactcggcgaggtgtgaagtggggtgtctcggcaatgctcatcggcgtcccgtatctcgccatcgccaacgtgttcaactaccctgactgaccgttctgtggtgacgtgcaacggggtatcgatgttggtgtgcgcgaggacgttggttgtgggctcgttgtcgggtgcgtaggcggcgttctcgtcgttgtcaatagtgatgcgggtggatagggcacggttgaggattcgccgctcggctggcacgtacgttctcgactgtggccacggttagagcgaggtgtgctccaacggtgtcaacccctgggccaatgtgttgatgaggtcacggtgacgagtatgtggtcatggccgcacactccagattgatccggcaggcttccagggtggtgaacctcgttgaggggtccagctaagtacctaaggtcatggccaagcacgatcgcattcgctttgccgtgtgctctctttcggatcatcccggggagcacacaagatcgcccgaacaatggcgatcttgtgtacagtgactttgctagagatgttttcccaggaccgacagtgactgccagtgcgatgttcgaggtagtggtgaaactacgggtgtacaagatctgggtggccgtaaacgaggttgcctcttgggctcaggtcctgcctgacggaacccccctatctgagccctggccatgacgggtatgccttagtcaacgtggctgaagtgtcctgatatcgcagcatcagtgactagtttggtaactgtaatgccgccgcacccgttttacttactttcgatagaaagcgggtactctgtgcactttgcagggtttttgccttcgttgcttcccgtgcgacttactgtgtcttcttccttggggaggtgtaggggagggtagaatgttcgtggactagatcaacttaaccaacttacgggttgtaggttaacacctatctgtcaaccttgacactgtaatcccattgttcagcaggcacactgtcatacatctcactatctgtaaatgcagagcctgtggtttcaccaccaaagcctaactgccttaaatgtgcaatcccgttctgtgctccctccaaatcgatccgctccagtgtttcatcagcttcagaagcatagaggaacgtcacgctaacctacgatttggttctgggttgaatttttaggcgatctgatctgaagtttcgcgcgcctgcatagcccgatccgcaatctcgtccagcccgctgattatgtgatgcagctcacaagtagttagtaacaggacctgctccgcggcctggcctctatcggtgatcagcatgtgtccacggcatcttatctaccacgatgtcgcaatagttgcactgattctgacggcaccgccaacattcggtaagtgtaggataggacaagccttgagagtgtggatggaatgtgccaactctctcagtcctcaaagcatcagtggctagatcaacaaacatcgtaaacaggttgttctctcttatagcgatgtgtctatcgaagcagatgaacgagtcatctgccaggtatgaatgattgccatcactagtaacctctgcgtacggcagcaagacgttactgatgtttgagattaggagatccccaaaaatagatactcggagcgaaatagtatctatacctacgatgatgccgtgaacactactggtttctcaagcaaccagatccgcacatttaaaccatgtgaaacgtccggtaaacattctgctgtaagtcacccaggtgaccccttggagaaagttatttcagggctatggggctcgggggtgcgagaggattgttcgttgctcatttcggattatctttcagagatgagcaaccgcaatcggcattgaccagaagcgggtaaccggttgaccctagacagacttatgtttggtattcgtcaagcccccatcgggcgactggaacctgatcaattagatgatttgattgctattcttagaagaatagtttcctagattttatagcacttcccctaaacgtctaagtatgccctaaatcgtagctctaatgcagatgggcgggcgaggacgttccgggaagcatcgtcaagagtgtcgatgtcgcctgctctagctaagactcgctgcctaggaaaatcctgaacccaagtggctcggtatttgggggtgtagttcctggcgctatcggtgatgtccatagcagtcttggcggcggacgtgttcgttaagtcaataggactccagctggttttgtactcgtaatcttcaagatcaacatcgattcttagctcagtattgaggatctcgatcatgaaactcgaatcagagggaaaacttaactatcatatgcaatatcttcttaagaagagcgcttgccgactacgttatcaagcgatcccacgagcaccaatctggtatcggtaaaagtgttcgcttttctcggcggaaaatccccaaaatgcttggatatttttcttgacggatgaacttggagaagcgctgttctaatgcggcgtcacgccagacagtgtgcgcccggcatcgcccaagcctgagtgtccgaaacatgcttgatgcgtgtgaagcgttcctgcgaccaaggctcagcttgctggggatgctctaattacttctgctgctcgatagtatgcgtcctaggatagacgttgacttgagttga

SEQ ID NO: 64 - DNA, 2854 bp, Propionibacterium acnes
tcttgttgagcttcaaagccatgaaatcttcggtctgcttcttaatgccagtctctgccgggaatcgctcgatggaagatgcgccgtagaagcctacgatgccatcggtgtgatcgagaatgtattgcgcatcctcgggattggcgatggggccgccatggcataggcataggatgtcgggattgacggatttggcggcgtcggcgagttcctgaaccttgacagcagcatcctcgatagtgagtgctgtttttgcaccaatggttccggaggttgtcagacccatgtgggggacgaggatgtcagagcccgcccgggccatatccttggcctggtcaacgtcgaaaacatagggtgaggtgaggagatcaagattgtgggcaattttgatcatgtcgatctccaaaccgtaccccatgccagtttcctcgaggtttgcgcggaatgtgccatcgatgagaccaacagtagggaaattctgcactccggcgaaccccgcggctttgatctgggttaggactggggcatcactctgaagggatcagtgccattaactccggcaagaactggggtgtgcttgacgacgggcagtacctcgcgcgccatgtccatggcgatctcattggcatcgccgtaagcgagaagccctgagagggagccgcgacctgccatccggaaacgtcctgagttatagatgacgagcagatcgataccgccggcttccgcggatttaaccgtaatcccggtgcctgcgccgccgcccaccaaggggattccgttggcgacttgtccgcggaactttttcaggatttcagtgcggggcatgatgctattcctttccgattagttatggatgatgagctcgtgaagagcccgcgccattgcttcgccaaaaccagaatcattgatattttgttttcgctcagtcacagtgatgtcggtatcctttattccctctcgaatggcgttgaacaaagcgtcatcggcttctggatcatagaaatcttcacctggggtatctattcctgcgacccccagagtaggaatgaaagcttgagccgggccgcgcgcagcggccgcctttatggcgattctgtgaccaagctcggccatttcggtgttgctcgtttgagcgtcaccgctggattgtggatatgcaacgtgcgagaggaatagcgctccggaatagtgtcgacagggccgaaattgaccatgtcaagcgcgccaagactgatgacttcgggtattccaaggtctgctgcggcttccatccggcggggtcctgccgagagaactcctccgcagaggtcgtcggcaagctcggtagtcgtcaggtcacatattcccgcgagtagcccagacgatgcgagcttttctatcgccttcccctcccggaatcagttgcgtggaagacgaggacctcgtacccaaggtctgtcaaggtcttgcgagcttcgtcagcagccggcgttgtcaatccgaacatcgtcaggccgacgaccggtttgttgtgagcggggttgctgacggttctaacgtcttcatactccttggccatggctgtgatagcggcggctgcattggcgaagaccatgagcgacacggaattgatgccggccacgtcaacgacggagtacataagtgtgacgtcggtttgtcccacgtaggggctgacatctccggaagccatcgtggaaaccaggagcttggggaatccaatcggcaatgtctgcatgaccgaagccgctacggatgatccacctgatccgccgagggacaggagaccgtggattttcccctcttcggcaagcttggatgcaataatcgaagcgccacggcccatgacatccatcatttcgccacggttatgacgtgttcggatgtcacttggcgactcgcctgcggcacgaatgacctcatcggacgtgtagtcggctatacggctgttggagaatgagccaacatcgatgatgactacctggctgccgttggtaagaatgcggtgacgaagccagtcgaactcgtctcccttggtatccaaagttccgagcaaagctattgcggccatgaacactccttcgtgatcgtgtcatcatgaccgtagttcggtgattctgcctacaccatgccgtttgagacgaattggcctgtacgttgtatcgctggttgtgaagaagggcaatacttcaggtgtggttgtcaaggttgatcctgcaagtctgagccggatgctgggggagtggagccagcccggagaagcgcttccggaagcgttggcggacgcattgctggatctcattgacgctggttttctgcccgctggtgcggttcttccaccccaacgagcatgcgccgcgacactgcaagtatctcggcaaaccgtggcggaggcatttgggattcttgaagccgcaggccacattgcggcgttggttgggtcagggacgcgggttagatcaggccgcgctgcagtgagtactgatggcaggttgttctcgttcagcgaggctgcacctggcctgatcgacctgtcaacgggggcgctacctgcgtcagaggtggtgcgaagagtgcggctagaagaccacgtcgacttggatgagtatttcgataccgacggatatttcccggctggactacctatattgcgtgcagccatcgcggaacggctcactcgagatggagttcccacagtcccgcagcagatcgttgttaccaacggcgctcagcatgcgagttatcttgcctctcagctcctggtctcggctggtgacaccgtgttggtggaggagccgacatatcggggtgagctcgcagagctgcgactgatgggcgcccgtgtgaagagtgtccc

SEQ ID NO: 65 - DNA, 728 bp, Propionibacterium acnes
ggttgtctggctcttcgggcctgaggtggggcagctagtcggggcccggtgcggtgaggggtcggggttattcggcaggatcagcagcgcccaaactcgctgctccaagaagaccccgactgtgtgtgagcctaccaactactgccctcgttgtgatgccctaacctgcccggtctgtacgtgaccgacgtcgagcgcggacccgatacgattatggtgggggtaaagttagctccgggcgaggggttctgccccgactgcggtgtgctcgcgtctccccatggccgccgccgggtcctgcacgatgtttcttcggcagtatggcggtcgtgatcgggtggtgtacacgcacgtggcgctgcctcgaagccttgtgtagcaagggctctttcacggaacaagatcctggaatcgccgtactgtgggcggtgttgacccgccgtgccactcgatgggccgtggggcagctgcgccgagaacgcgtctcagtgctgggactcgcacgccaagctcagggcgactggaagactgtctggcgggcggtcaacccggtcttagaggaggcggacgctgacccagtccgctttgcggggatgcggcacctgggggggtgagcacgtctggcacgacaagaacccacgaacccggggaccgaagatgctcaccggcatagctgtcttcacgcacaccgacgacgtcccacgggcccggctgttagacctgaccct

SEQ ID NO: 66 - DNA, 727 bp, Propionibacterium acnes
agggtcaggtctaacagccgggcccgtgggacgtcgtcggtgtgcgtgaagacagctatgccggtgagcatcttcggtccccgggttcgtgggttcttgtcgtgccagacgtgctcacccccccaggtgccgcatccccgcaaagcggactgggtcagcgtccgcctcctctaagaccgggttgaccgcccgccagacagtcttccagtcgccctgagcttggcgtgcgagtcccagcactgagacgcgttctcggcgcagctgccccacggcccatcgagtggcacggcgggtcaacaccgcccacagtacggcgattccaggatcttgttccgtgaaagagcccttgctacacaaggcttcgaggcagcgccacgtgcgtgtacaccacccgatcacgaccgccatactgccgaagaaacatcgtgcaggacccggcggcggccatggggagacgcgagcacaccgcagtcggggcagaacccctcgcccggagctaactttacccccaccataatcgtatcgggtccgcgctcgacgtcggtcacgtacagaccgggcaggttagggcatcacaacgagggcagtagttggtaggctcacacacagtcggggtcttcttggagcagcgagtttgggcgctgctgatcctgccgaataaccccgacccctcaccgcaccgggccccgactagctgccccacctcaggcccgaagagccagacaac

SEQ ID NO: 67 - DNA, 32951 bp, Propionibacterium acnes
ggtggtgccgaagaagaaggaatggccccaccaatctgctggtcggtagaagtacggggtttgagccagtcgagtagtttcataatctgctccttgcaaggtattgtgaaggatatgaaatctcttacccctcatttgcttctctgctcttttttcacaagcattgctcctgccttaggagaaggatttcgcaacaaacgtgtggctttcattccgacagcagcagcccacgaggagtacacagcctacgtggattcagcacgctcatcatggaaagaacttggcagcaatatcaccgatgtggatattgccagaatgcctctaagaacagcgaccgaggcgcttgagcaagccgagataatctatctttcaggagggaactccttctacctcctcgattgcctacgctcaacagaaatcgaccagattattcgagggcgtctggccgaaggggcgattctagttggtgaatcagctggagctatagtttgtagcccaaatatcgcctacattcagccaatggatcgtgtccctgacaactacagccaggctgactacaccggactgaacttagtggacttcttcccggtacctcactacctcgcccctccatttgtgaagagttccaaggaagtagtcgcccagcacgctagcctcccactcgagctcatgaacaacgcagaagcggtaatagtagagggtccccaaaggacaaagatctcatcagagcaccagtagtcctcgtgagtcgtacaccgacgtgcccgtgtggctgccaccgcctcggatagcgcggtcgagggccatgatggtggcgaccacctcgtcgatcttctcggtggacttttgcttgtcgggtttgatgtttcctgccgggtcggtgcggacgtgaatgttgtcgaccatccaggacagcactgggtgcctgccgtgagcgagcctaccttctagtgcgagtctcatgagctccttggacggtgggctcatgtctttgaagccttgcccgaagggcacgacggtgaacccggcatcgtcaaggttttggctcatctggactgcgccccacctgtcgaaggcgatctcgcggatatcgaagcgtgtcccgagttgctcgatgtggcgttcgacgtgggcgtattggacgacgttgccctccgtggtctctaataagccctgttggtgccacaggtcgtagggcacatgataacgcgccacccgcaacgccaggttgtcctccggtatccagaaccacggggcgatccggtacttcttcgtccccgtagggtgggaagatgaggacgaaggcggtaatatccgtcgtagaggcaagatccagcccgccgtagcagcgtcttccttccagctcgtccaggtttaccgggtcggctcccgcgtcccagatgtgcatgggcatccaccgcaccgactgcttgacccactggttcaacctgagctgccggaacgtgttctcctcggcagggttctgccgggccgagttgcacgccgcgcgcaccttgtcgatcggcaccgtcacgcccagtgaggggttggctttgcgccacacggcctcatcggtccaatcatcatccgcgtcggccccgtagatcaccgcatagaacgtcggatcatacttcttgcccgcgaggatgtcctggactttctggtgctgctcatagcaaatcgaatgcgtatcagttccggcggtggtgatcaggaaatacagcggctaggtgcgtgcgtcgcccgaacccttggtcatgacgtcgaacagggctcggttgggttgggtgtgaagctcgtcgaagaccacgccggagatgtcgaacccgtgcttgaagtaggcctctgcggagaggacttggtagaaggagttggtgggcttgtagatgattcgcttctgcgaagagaggatcttcacccgcttcgacagggctggtgattggcgcaccatatcggcggcgacttcgaacacgatcgaggcctgccgccggtcggccgcacacccgtagacttcggcacgctcctcaccatccccacacgtcagcagcagggcgacggcggcggcaagctctgatttgccctgcttcttggggatctcgacataggcggtagtgaactggcggtagccgtcggctttgacggtgccgaacaggtcacggatgatttgttcctgccagtcgatgagctggaagggctgtcctgaccagcggcccttggtgtgtttcaaggcttggatgaacgcgaccgcgaagtcggctttccgcttgtcataggtggagcctgcggccatgaaccgggtcggcgtgtaggtgtcgagagtgcgcatcacgcccgtcaggctccttcctgtgctggttagttggtgtgggcgaaggcccaggcgatggcgtggccggcgtcagcgaacagttcgtcagcctcggcgaccaggtcgagttcgcattcactgaagcctcgggcgtcctgtccccagccggagatcggctgctcggcgagcttgtagacgcgggcgtcgtttccgatccggcctttgcccaagtgccggtaggccgaggcgaggacgaagtccccgtaggcgatcaccgtgccgtagctgtcggtcgccatctgcagctgctccatcgtggtcttttcgttgttcatgaccttctccttcttgccttgttcggtcatgtacatacagccataggtgcgcgctcttatccagtcgtaaaagccctagtcagcccactatttttgaggaatctttgaggggcgacgggcacggaaacggcccctgattgggtgggtacccacggtggcttggggtcagtcgatggccaggtgccaggcggggatcatgcggcgttccccggtgatcgggtctgggtagcggtcgttgacttgggtcatgcctcgcagggttgcccctgcctgggtgaggttccagatgatcgtggtcaggccggtctggttcgcgctgatcgtgaactcgccgatgctgtgctccttgagttcgtcgaggatgctgggcacgtctgagtcgtagagaccttcggcgaagtcgagcagctcgttgcccgcccgctggctgttcatgtagacggtgagcaggctcgtggacgaggtttgggtgcgggtcgcgatcttgctggtcgaggtcgtcaattgtgttcatcgcgggtgtccttgtgggtgggtggggtgcgccaggcggcgttgccgtccaagtgtttgagcaaggtgcggcggacgggtttggtgtcgtcgccgatcagaccgaggcgcagcagccagcagcgcatcgcatatttgtcgttcccgcccgtttcggcaggtttggctgaggctcttgtggcggttttggcgtggtcgatgatccgggcgatcagcaccgtggtggcctccactacctgcgggtcgggcgctacgtcgaaccaggggaactcgaccgtcccggcctcggcgtcgatgctcatcggggttgcggggatctggagtgctttggcgatgagctctcctttcgctgctagcgtcgcctccaccttccctttcgtggtgtcctcccaaccggtggtggggaacgccaacgtcaaccccaactcgcctggctcgtcggtggtgtccgtcgggaatccggcctgcgcggccgcctcgaccagcccggccacgtcggtgtcctcgggcagatgcagcagccagtcacgatccaacatggcctcgccaatctggtaggcaaacgttggggttcccagatactcgacggtcgctcgcagctgggtggcgagaaaagcggcgagttgcttgcggcctttgcgctgcttggtgaacttgagtgtcgtcatgaccggcctcctttgcgtgttcccctggtcggagtggttttcggtcatgtacatacacgctctatcccgaccagatagcaagtccggacggccacctatttcttgcctcgatccacggccttcaccacatccaggtaggccaactgttggccgtcgcgcaggcaggtgatacctgcggcgtccccggtggcgtcggcgtagcggcgcagaatgactgaggcgtatttctcgtcgagctccatgcagtaagcgatccggttggtggcctcacacgccatgagcgtggagccagagccggcgaacgtgtcgagcacgatcgcattcgcctgggtggagtttccaatcggatacgccaacagatccagcggcttcgaggtcggatgatcagcattcctgcgaggcttatcaaaccgccagacggtggtttgtttccgatccgcgtaccacgtgtgcttgcccgtcttcacccagccgtagagaacgggctcgtgttgccactgatacggggaacgacccagcaccagggagtccttgacccagatgcaacaccccgacagcttgaagcccgcgtcttgaaaggcgcgccggaagttcagaccttcggtatcggcgtggaacacgtacgcggacgcgcccttctcacacacgcccgccatctgagtgaacgctgcgagcaggaactcgtagaacccgtccgcgctcatcttgtcgttcttgatcgacaagccgtcagacgattcgaaggcgacgttgtatggcgggtccgtgagcaccaagttggccttcttgccatccatcaacagctcgatgtcgcccgcgttggtggcgtcgccgcacaccagccgatgcctacccaccgtccagatatcaccccgctcgacgaacgcggcagcctccagggcggcggtcagatcgaagtcgtcatcctccacctcgtcctcatccaaggagccgatgagctgggcaatctcatcgtcgtcgaacccagtcagctcagcgtcgaaatcactcgcgtccaggtcggcgatgagcagggcgagcttgtcctggtcccagtcgccactgatcttgttgagcgcgacgttcaaggctttttcgcgggtctcgtccaactcgacgaccacgcagtcgacagtggtttcaccgaggtcttcgaggactttgaggcgctggtggccgccgacgacatggccggtggtcttgttccagatgacaggttcgacgtatccgaactccgtcagcgaccgcttgagcttttcgtagtcggggtcgccgggccggaggtctttgcgcgggttgtagtcggctggcgtgaggtcagcgatgggtagctgctcgatgcgcacggggctccaccgccttccgcaggtcgcgctcaaaacgccaggtttgttcccagcgcggccaatcccggcccatgtgcccgtagaccgcgagatcccggtaacggggtgtgcgcaggttgaggacgtcgatgatccccgccggccgcagcacgaacacgtcacgtgcggcggcggtcaagatgtggtcggcgtactcgccggtgccgagcgtgtccacctcgaacgcgaccggatcagccttcccaatcgcatacgagatgcccacctcgcactcagcggccagcccggcgtcaacgatcgtacgagcgatcaggcgagccatgtaggccgctgaccggtcgaccttggatgggtccttgccggagaacgcgcccccaccatgagacccgagcccgccgtaggtgccgaccatgagcttccggcccgtcagcccggtatcggctcgcggcccgccctcaacgaaccgacccgacggattcacaagaatttcggtgtgctcgtctatgggtaggtaggtctggcaggccggggccacaatcagcgagcgcacctcacgctccaacacggccagatccttgcccgcctcatgctgcaccgagaccacgacggtctcgacggcggcgggggcaccggtgtcgtcataacgcacactcacctgggccttgccgtccgacttgatcccgcagatcgtcccctcgacctgggcagtatcgagacgctcgcagatgcgatgtgccaggacgagcgggagcgggaggcgttcaggggtctcggcggtggcgtaaccgtagaccgtgccctgatcgccagccccctgcaacgcgaacgccgaactatcaccaccgcgtgcctccagcgaggtggtgaccccggcgttgatgtcgctcgattggcggcgcgtccacacgtagatcaggatcccgagcggactgtatccggcacgcgcgagggcggtgcgcacagactcccggatacgcgggcggtggttggtggtgatttcgccggtgacgatgatccgccgaccggctgccatcacctccaccgccacccgtgcggccttgtcgtcgtagaggatgtcgtcgaggatctggtcggcgatctgatcggccaacttgtccggatgaccagcacacacagactcggcagtacgaatcgaacacataagcacactcgcttccacgaatcggaggggaacaagaaagcgtccaccccactagagggtggacgcgaagatcatgaggggcggttaggagcgggcgttgagcagctgctccatcacctcgtcgccgggcgtggtgcccgcgtagtcggtggtgcaggtggcgcgcacgatctcgtaaatctcgtaccaatacacattcgcctgcttcccgaaactctgggacatggcgacaaacgggctggcgatggcggcaccggtggtggggtgcttgccgagcaggccgaacttggagatcgcctgctcgcactgcacataccgggcaaacgcctgcgcatacgcctcaatcaggcgaggcgccacgaattgggaaccgccacgttgatcgagccactgccacgtctcccgatagacgaggtcagcgccaagcggtttgccgtcacgctgaatctccgacagatagtccgatggttcgggcatcgtctccccggcaagcaccgcaccgtcgccaatgtcattacctgcgaagtcgaagggttcgttgagcgggtcttccaggcgggtggcggggcgtccggcggcgagtttctcgcccagcgggccgggcttcgcgcctgcacgcacgcggcgtccgcccctgttggtgccgtctttggccatgggtcgcctccccgccgtagaatcgtcatggtttcggtgctgaagtccacgggaggtgtgagtggttgagtctttaaaactattcgttcggacctacgtgtattgggtagggctcatccttggcttcgcgatagtgcccggttctctgctcttcactgctgaagtcgccccggtgaacactccattgtggcttgcacctttcgccgggctgctgctttttgtcattgatcggccatcaacatgggagccgccgctctggcgagcattactgatccgagtattgggtgcaggatttgcagccaccatgctcatcgcgtttgatgcagttgcttccacccactatggatctcaacactggagtgagacgctcctatctttcggtctcggttggattgtcttcacggtagtggcaggacacatgctcatgagcagctccgcccgatttggcacacctgctcacacgatcagggacgcgatccgtacctacacgacatggataggaatctgcttcgggattttctatatccccgccgcgggactctccgcagctggcactcttttgatggttcttccgctttatggaacgttcctcgccggcctggttcttttgatagttgacccgccacgacgatggccgcaaccgcgagtgaaggcactgtggatacgactcttgtcaagcgtggcagcagcattactacttgttgtcacgaactcgttctatcgcagtactcgcacacacgagattttcgtcggggactggcaggaaaacctggtcttcttcgtgggtgcttgggcactttatgccgcagtggctggggccaggtatcttacgcctggccccagccacgaagcagatgacaaactcagtagatgaattcagctagagcttgacatgctgccctcttggtttcttcgctaggctcaacgcccgagtagccgtatgccccattggaaccgtctgtgagaaggccaacgtatctgtcatccaatgggccatcaatttctgcaaagaacttgtcctttgcggttcctccgtcgcttgcaccaacactctcagagatcgccttgaatcgctgcaatagcgaaactggattgttgtagtagctcctcagcgttcgggacagaaggttggggtcgtcggctcccgagcctttcagcatcgcagccagtttgatcgcatccccgtcgctacacaggtcggagtagttgcagttgttcggcagatcattggggatggtcaaaccttgaagtccgctgtgattcttatagttatccccttggccaacaagagcccttgctattgcaataatgtttgagccgggattcaggtcaacaaccttttgaatcggaccgagcgctgaagctaagtcacccgcccatcccgtccacttatcaggaacgagcgggttcaggttgatgtagcccagggtggtcacgctcatatgcgggatatctactgcaccacctgcggggtccgtccattcttgtcgatcgcagcgaatccacttattcaaggcagagattatctgagacgcttgagtgtcatcttccagccttttcgcgtccgcctcccgatatgcttcagctgccgcggaccactttgcacttcccttgaggtagaccgttgataggtagttgaggacacatcgccaagtcggaactttgacccaagtaacgtagctgccggatgtgatcggatcctctccgaaagcgtagtccttatagaccacgcgcaattcctcgaaccggctctcaagcgcttcgatcagatcgagaaaatctagagcgtcgtaattcactggctgcgcgtggcgcaccgacgaatcggctgacatgcgacccgaatatgccacgcggtcaagatcccatttcccccgatatccactgatttcgtggaactgatcaaatacccagttgtcggggatggggaaaccgagattacctgagaatccggtagacatgtcagaaacgaatgatgctaccgcgtatccagcctgagctatccgggtgcagatgtttcgcgaggcgtagatacccactcggtagccgccgccgaggctttgcgttactgccttgaagtagggcaggatgtggctggtcacctgaggatccgtggcatcgtagtcaacggcgaagtagatcactgtaggtggaacaccaagtcgttgggcagcggtttgggcctctttcgcatgacggtgcccattttcgacactaaagtacttaagttcagttgagtactcttgaaaaattgggaaatacttcagcccatgaccaacgattcgctctagctcgcctgtgcggagcgccttgaaatagtctgcctcagacttactgctttggttgggttcactgagatagcggcctacgatctgataaccatcagccttaagatgtccagcaagctcgtcagtgatctcaaagcgcgtatcgcaagccacacatggccgattggggtcgcctttagaagtgagcaggctcatccatgtggttgggtcgaccaccccggtcactggcaaggcgtgtgcttgctggaactgccacagcgtgttgctgatttcgctgttccacgtgctggtcggcaaaatggagtagccgttgcagaccagactcacagtggctagccatacccactggttagtgccgctactaattgtccgtagtttggagcgagtgcctgcaccaaaattcccggtggcttcggcaggtgtgtatccttcgattgcttggaggacctggattaaagccgtgttcatttcacgcccgtacaagccatcagtgggaatgatccctgtgtagttcttgtacccacggttaatcgcttgctgtgcctgacgaatagctgtcttgccgccgtaggcagagagtaaccggaactgtttcattgacagaagcgccatcattagttcaacatcgaccgttgcgctcgtatcgccaaggccaatatcgactttcatctggcgaatagagtcggccaagtggtcggtaaactcaagagtgatgccaccgtattcggctcgatatcccttgcaccacaaggctccttgaataatcccatgaacattgtcgtagccagaagtttgagtaatgccgtttggccaacgagacttgaatcgagactgtgttccagaaccgaaattgtttgccgtcgctgtaatacccagttcgatttgcagagcgcggatgagtgcgttgattgtatcccagccagtgttaccggtttcttggactgagccgaacccagttttattgccgtaagtcgaattcagccactgctgagttttcagcaccatttgatctgccatgattcctccttcagaaatcagttgttaactcgaggcaggcgaacacctgccacggaggggtccagaacaccggatgagaagctccgagttttttgccctcgcctgtacgtcaccgggaaacccgaatccggacggcaagagcgaaacttcgcgagtttcatccctcactggtactgccgacgaagcccgaagtgttaataccctgtttgattctgggactttgcgcgcagttggccccgcccgctgacctgtccgagcgtcgtagagatcgagaggccccaaccccctcgccagcgccgccaggttcccccgtgtctgccgatcagcaccgaggtgggcatctttgaggtttcgcaacctcggcgcgacgtggcgcgacgtggcgcagatttcagtaggtgtagatcctcggggtctgcctccaccggtcgccgtcgagcgccgactggcgggagtggcacggcttacacaaactgcggaggttggcctggtcatgggtgccgccgtgctccaacgggatgacgtggtggacttcctgcgccggggtgtaccggccagccgcgaggcagtcctcgcacaaggggtgggcggtgatgtaggcggtacgaatcttgcgccagcgggccccataacgtcggttgatcttcgggtcacgctgccacttgcggtagcgctcgtcctccgccttggcgtgggcttcgcagaagcgggcgtgggtgaggttcgggcagccgggctgggaacacggacgggcaggcttgaccggcatcacgcacccctttcccggacacggcaaagccccaaggcacccagccgatgaccgggcttgccctggggcttttcctacttttcaaccacctacatcattgcaggcccgaaaccctaaatgcatccgcagttcttgacaccttttggcggctaggttcacgcggcctgcccatacagcgccgacgccagccgggcgagcgcccgagacttcttctggtaggcgctggtgcgctccacgtagaagtggtcacacaccgtttgcaccgcctcatcctgggtaccgtcgccgaggaagaatgcttcgagcacgaacctgtcgtcgtcggtgagcagctgccaggcgggcaggaaccacgccatgtactcacgcgcctgggcgtaacgggcacggtagatgtcgatccgatccaacgtggccgccacccgcatctccccagcatgcagatccgtgtggcggggcatcccgtcgagtttcgatgaggctggggtggtgacgtcgtcgtaggcggtcttgatctgctcgtcggtggtgtcgatgatctgctccatcacggcgaagtcctgcaatgcgctgatggctgctttgcgggtgtcgaggtatttggtcatcacatgcatgacgactccttcctgcttatggttgtgagttcggtggcgaccgcgtcgatcaatgcggcctgggtcatgtccttcgcctccagcgccttgaggacggcttggtcgagggtgccggtggcggtgaggtgggtgatggtgacaggctcggcctgtccttgtcgatacagccgggcgttggtctgctgatacagctccaagctccaggtcagcgagaaccacacgagcaggtggccaccggactgcagattcaatccgtgcccagcggaagcggggtggatcaggccaagcgggatgtcgccccggttccacgcctcgatgtccgccgacgtcttcagttcgcgggcttgtgggaagcgacgctggatgcgttcgcggtcgtgtcggtaccagtaggcgacgaggacggtttggccgttggcggcctcgatgatgtcttcgagggcatcgagtttcgccccatgcacctcgaccgtatcgccgtgctcgtcgtagatcgcacccgaggcgagctgcagcagcttgcccgacagcgcggctgcgttcgccgcatccaccacctgcccatccagatcaaccaccaggtcggccttgagctgctcatacacagctcgttctccggctccgagcaccacgggcgtggtcgtcaccgtcagatcaggcagcgtgaggtggtcggtggtgcgcattgacaacgtcatgtcggcgatagcgtcgtagatttcctcctcagcgcctgccctcggcttgtacgtgaacacctgcatcccgttgcgcttatccggcaggaaccacttgtcgcggtagcgggtgatgaatctgccgaggcgttggccgccgtcgaggagccggaattgcgcccagatgtccatgagcccgttggaggcgggggtgccggtcaggccgacccagcgcttcacgtgtgggcgcattttcaccaacgccgtgaaccgcttcgcacggtggttcttgaagctggagagttcgtcgatgacgaccatgtcgaacggccagctatcgccgtactgtctgacgagccaggggatgttttcccggttgatgacggtcaccatcgccgacttggccagcgcgtcgagccggtcagctttggtgccgaccgcgaccgccaccgatagaccttggaggtggtcccacttggctacttctgctggccaggtgtcgcgggcgacccggagtggcgcgacgacgagcacccggctgacggtgaagtagtcgagcagcagctgccagattgccgtcagggtgatgacactcttgccgagtcccatgcccaggaggatcgccgcttcgtggtggtcgaggatgaaccgcgtggcggtctgctggtagttatgcggccggtagcgcatcaagcaccttcttgatgccgtccaccgagtcaacgaccagcgcggtgaagccgtgggcggccagttggctcatccggcggcgttggatcggccgaggcttcttgccgggggctttcacttcgacgaagacgacctggcctcccatcaggcatagccggtcaggtacgcccgtggttccagggcagacaagcttccagcacaagccgccggatgcctcaacggccttcttgagctgggcttcaatgtggtgttcgttcatggtcactccttgagtggtttcccacgggggtgacgactggtgacgggtggatctggacttttctaaaggagatatttttgtggccttagtaatagttcaatactgatcgtcaccggtcgtcaccctcatcgggtttagctgttgaattcgctggtcagagccagtccgtagacgtacatgccatgcttggacttgcgtcgttcaaacccggattgttcgagagtggcgttgaagtcggccatcggccgagcccacccgctggtggattgcgcccacgctcggtactcctggtacaggtcaccggcgcgttcggatagggacgggtccacctcgcagcgggcgtcgaggaattgggcgaaccagttgttctcttcccgatatgcgcttgaggcagcgaccacttgggcgggtggggtgagctggtagtcctcggcgtggatgagccgcgagccttccatgatccatgcaagtaccgctccgccggcggtctcgtagaggtggtcggcgtagttcttcacatcggagctactctcgatgaccgcgttgaacgggatcacgatgagcctgcgccagatgcccgcatccatcgcgcccaccctgggcaggtgattcgtgtagaggatgagcgtgtgggatggggtgaacgcgaacggtgccttgtatttcttctccgcgtagatctggtcggtggaggcgagttgcttgaccgtggaggtggataggcgcacgccttcctcggactctgcggcgatgatgagccgtttgcctttcgcttcggcaagctcaggtttgacgttccggttcccgccaatggtgagcacgtcggcggacatgttgcccgcatacgtgccaagcactctcgcgatagtgttccagaacgtggacttgccgttgcggccgtccccgtaggcgatcacgagggcttcgaccatgaccgtcccgatcgctgccagcccgacgatccgctgcacatacccgatcagctcccggtcggattggaagaacacgttgagcgcccggttccagatttctgcgcccgtgtcggtggggtcgagcgcggtttgtttcgtgatcagatccagcgggttatggtcacgtcgggtgccgtcacgcacatcccacgtgccgccaggcgtgttgaggagatacgggtcagcgtccagccgggctggggtggtcagcaacatcgggtgtgcttccctcaggcaggaggtgatcgcccgggactcgcggcgtttcaacacgaacgcctcgtatgccttcgcgtcctcaaatgcccggtaggcggcccgctgcggtgaggtgaaaccgccgagtgctttcgctttcgacgatgcggctgcgagcaccgcgttcgcgcccgtcaccatgagctcgtcgcgggctttctccagcagatgcccggcctcggctagttgccggtcggtcagttcctgggcgatgccttgcgcagcaggcgcagactcagaccacacaccgccttcgtagacgagccagtccgtggcctccgtaaacgccagacgcgacgagtattctgcggtgagcatggatgcctgcccgacatcggtgaagtcctccggccgcaggctcgtcagctccgcgtaggcttccggcgacagataacccggctgcgcctcgactttggcggcgaaccggcaggcgctttgccagatcgactccaactcgtgatccgacaggggcggttcacacagggacgctttccggtcgaacaggtcacgagcttgggcggtctgcccgtaacggatcaggacgcgtccggcgaagcgggagagggtggcgttgcgggagccttccccgatcacctgcgtggaagcgtcgaacgcggcgaacacgtcgatctcgtcggcctcatccagccaggcgtcgagcagctttgtgccgttgtggatggtggtttcggggttggtggtgccgtagatgaaccgtccggcatccaacgcctgcgggtcgaagaacccgaaccgtccagcgaggcggcgcttcaaccccgcataggtgtcggcgtcggtgaccgggctgattgggaagtagacgtggaagcgaggcctggccgacagcgtccttttcggcttctggtggttacggctggtggcggtcatgaactcaacccccgccatcagctcggccaggtcatctggggtgatccactcgtcggggttgtcggtgtggtcgttgtcgatatccatcacgacacagtccgaggagatgaagctcgccgaggagcgccggtcgccggtgtaggtggcggcgacgtgatccaaccacgccacctgctccagcgaggtttggtcggtgatgtggtggtggttcgggtaatggttattgtgcgggttgccgctactcgtggcggcgcacaaggtgaacggagtcatgcgggatgcacctcctggaagtcggcgtcgaagaagcggatcgggatatccatctgatgggcccagtcgatctccgcccgcatccccgggctgaccctgccgatataggcccacagctgctcgcatttcgacagcaggatgcggttgaaaaacatcgccagctcccgggcatccgggtcggtgtcatccatgaactgcggataatgcaaatgcggagccaacgggatctgacgagcctttaccgcaaacgcacaaaaccggcgggcaagctccacgttggctgctatgtcacccgagtacggggagcagatgtagaccaatgggcggtagccgtattcggcgagctggatttctttcagcgcctggtagcaggtcgggtcggggtatccgtcggcgttgcgcagcggaatacccacatcgatggtggcgatcatcaggcgccctgaccttcacgttcgatcaccggcagcaggccacgggtgttcttcaacaggtcgtagatgaacaggcgacccttctgcgtccagtacatgtgggtgcgggtcttgccctcgtcgtactcgtgcgtcttggactgcgtgtagccctgctcggcaaatttcgcgtagaggaaccagcgtccggactggtggaactgcacctgctcctcgcgcagaatctggttaagcttcttcgccgacagcccgtagtccttggcgatctctgtggcggtgatcagtgagggcgatgccagcacgatgtcgtagtacgacaccttcggtgccgcctccaacaaagcttgctcggcggcgagccgcttggcacgttcagcccggagcgtggtgatcgcccgctccagaaactcgtcgtcagcgagcagttcgtcgatggcgtagataccatgtcggcggatcgtcggcagaacctcgtcgaacacccacgtctcgaacttctgggcggcaggaagtttggaagtgacgatcagccggtacaggtcgccttcgctgatgaacctgacctgctgaaccccacctgctgtttcaagggggtagtgattcacgactcccttgcagtgacgtgccagagcgtccttcgtgttggcgtagccgagggctgtagccacgtccttgccgcagaacaggatctgcccgctagaggtgatggttcggattgtgccgaactcgtggttggtgaacacttgtagtccggtagccatgaccagctcctattctgagagccaagtagacaatcggcggcgcggggtgcgccaggctctcacctgtcaggcacggcagacaccgaaaccggacacggcttgaggaaggctctcgcccatacgcccccgagcaccgacaaatccggacgggtcagagggcacactggtgtgtgaacgtaccgataactccgtgccccgtgctcttgcttcggcgtcatcaaccaggtagccttgtagtcaacatgaccggttccgctgcccgcctcggtgggagtccagggccggtcttcgtttttcgtatcaaacaggggtgcgcgtggagcaggtgaagcagttcaagacctacggtgaacaggtcgaattgcttcgtcagcgtgggatgcgagtgaatgatccccagcatgctgagacgctgctggcgcgattgaactactaccgcttgtccggatactggtacccgatgcgccgtttctcccaaggcgacggcactgcccgagatgaattcgttgagggagcatcgtttgacctggtggtagccctctatgggtttgacgaacaattgcgccacagcgtgttcatcgagcttgatcgcgtggagttggctattcgaaccaagctcggtcacgaactgggtcgccttgacccgctgatctatttggatcccaagcgtttgagcgcccgggcacggcagcgaaacaaagacgggcgtagcgtgcacgaggtgtggctgagaaagtaccagtcggcattgaaagcgtcgaaggaggacttcgtcgcccaccacaaatccaaatatggcgggactctacccatctgggcggctgtcgaaatcatggattgggggatgctgtcgtacctgtacggcatgtcgcccaatatcgtgcgcaaacggattgccgagccctgcggcctaactggtcctcagcttgaatcatggctgaaatccttgaatattctacgtaattacgcagctcatcatgcaaggatgttcaaccgtgtttacgacatcaaaccgaaactgaacaatggcgtcaggctggctccggtagctgaaggaatgaatcgcgtgttcgggcagctctcccttatccaatacttgcaccgccaactggacttgtctccagccgaccggctaccgaagctgttccacacctacccgcacaatcccatcgtgccgttttctcgcacaggagcacctgacaactggcgcgagttgcctctctggtgcgtctaatccttgcggtagtagtcgcattcgtacccgtcggcgtcgagtggcagtcctgctgcccagtcgggtggggtcgtcatgagctggcaggcatcggcgatggtgaagccggagtcctcgggttcgtcgatgacgatttcgtcgtggacgtgcatgacaatcttgtgcccagcctgagcgacgagtgtcatggcgtggacgaggaggtcacgagcgactgcttggacgatgttctcgacgagtttcccgccgtaggtctccagccgcccccacttgcgtccggtcgtgacaccgctgtaggtgatggaggtgccgccccaccggttctcaccaagctggggcttcacgtaggccagccgcctaccagagggcagggtgatgaacaagatgccggactcggcagtgaagcgaaggttgcgcagccgaacagcctggcgggtggtgatggcgtcaagtgcggcctgctcgacatccgcccagagtcgcacgatgttggggttggctgcccgccaggcgtcgacgatgggtttgagttcgtgctcggccagccccatccgtagggcacccatcgccttgagcgctccgacggagccgttgtaaccgcaggccagcgtggcgatcttccccttctggcgcagctcagcgttgatgccgtgtttttcgacggggacgccgaacatgcgcgacgcggtctcgcagtagaggtctttgccgtcgcggaaggctgccagggtggatgtttctccggcgagccaggcgatgacgcgagcttcaatcgcggagtagtcggcgacgatgaatcggcatccggcgctggggatgaacgctgtccggatcaactggctgagcgtgtctggcacggagtcgtagagcagttcaagggcgtcgaggttgcgttgtcgggtgagggtgcgggcttggtcgaggtcgggcaggtagttacggggcaggttttggacttggacgaggcgtccggcgaatcggccggtgcgtcccgctccatagaactggataaggccgcgtgccctaccgtccgtgcctgtgacgttatgcatcgcctggtacttcttcaccgagcttttcgcgaggtcgccgcgcagctccaggacttctttgaccttgcccgtggcggactcgagggcggcttcgacatcagccttcgccaaggacgacatctcgcagccgtgggtggtgagccattccttcaactggatcggtgagttcgggttctccaacccggtcaactcccgcgcccgcgccaacgtggcggcacgatgctggtcgtccagggcgacggcagcgtctgcgagggtgtggtcgagcaggatgccggtgtcgttgatgcgttgatccagggcgtaggcgtcccactcggcttcgggaatcggaaacgatgagagccggtcgtggatcgcgagttcgacctcgacgtcgcgctggttgtagtcgatgaactgagcccagctggtcgggtcgctgctgggcaggttacgggtgccgccaccgttgagcacgctgggtgtggctggcgtgcagaattgcttgatcagccgcttacccgccgtatccttctgaacgtcaaggtcaagagccgcaccgaccgcatccaagctcatcggcagaccgagttaagccgaccacaccatcgtgcagcgccactggctcgggtcaagaaacccggccgccaacagctcggggtgatgacgctgcagccacgcggagagcgcgacccgctcgaaggcggcgttatgcgcccacttgaccacgcccgggtccaccaatgctgcgagcacctcgtcgggcagcccaccaccactggcgagatcgacgacttccaccgggccgccgtcgatcgagtagccgaagatgaggaggcggaagtcggggtgttcggcatacgggtagacgccggttttcgctaggggtgctgggctgaaggtttcaatatcgatagcgatctggcgcatcagggctcctggacagtcgggtaggcgaaggtgagggagccaaccggtgtttggtggctccctcactgctggggtgctacttcgggtcgaggttgtaggtggcgttcatcctgtcgagctcggccttctccttggcgatcagctcatcgatgcgctgacgttcgcggcgtttggcccgcttgtccttaatccagtagtagccccagaccatccagaacgggatcaggacgtagacccacacggcgagggtgatggcgttgaaacagtcactcatgattcagcctccttagttgaggaagtcgtcggccggcgcgccgaagtcggactcagcggagacgcggcctgcgccaaggggttcaccgtcgcggatcttctgaatgttgcccagcccgcacgccacacccttgttcccgttcgtgttgaacgcgtagaacgacagggagacgcgggcgtagcaacccgagtacacctcggaacggtcaaggatcggagagacgttctcgtccacaacctgcggcggagtgaggctgttggcgttgacgaagaagctgtttgcgtaggcttcgtcgtcacgctcggtatccccgtcacgcagcggcagcttcagagccgccttgttggagcgcttgcctccgaacttggccgtaccagcgtcgatcgccgcgtcgatggccttctcgatagctgtgatggtggtggtgtcggccttcgggatgatcagcgacacggagtacttgggcttgccgccctggatggagttcggctcccacacgtgagcgtaggagaggcggacttcgccggtgacgacgcgggtggggttgttggttgacaaggttgttacctgctttctgttttcgtgaattcggtttgtacgctgtggatttccagcgcgggtcgtttgtcggtgtcagacacgagcgtcggcttacccacgggcttgaccacgaggtcgccgagcacctcgttgaaggtcttcttgtccatgagccgttccatcgcagtgagcgtgatgagtctgcggtcgtagatgtcggcgtacccggcagcttcagccgcttcggcgacggcgttctcctccgtgtacttgcggacagaccgtccggcgacgagcttgaaaccatcccagtgcttgccctggttcaccgcctgcgagagcgcgtaggcctccacatccgcagcccacgttttgagctgtggaatccttgtcagcacgtccgcaatctcgctgccggacagctcggccggtggggcgaactcgtgctgggcgagcgcgaggttggcttcggcgcgtgctcggcacgtcggtgcgatgcggcagaactggcaccacgagccgggacagaactcgcccccgcccgccgcagccaactcggccttcggcttcacctcggtctcagcccatgcgaggaggtcggcgacgctggtttcccaagtgtcaacgttgccccgccggggctggtagatcgtcaccgcaacatcggtgatgtcatacaagtccccgaaagcgtggacggctccgagcgcgtacaacatgagctgcgggttgtgtgcggcctcgacgaggatgccctgcccgtacttgagatcgatgatctgcagcttgggttcggcgatgatcacgcagtcgccggtaccgaaaccgcccggcacgacgtgggagaagtcgaggcgctgctcgatcagcacctgcggatcaccacaggcctcccgtgccagtgagatgtgttcctggacgaaggcgacgtagtcgtcggtcaggtcctccatctcggtatcgatccagccggactcgggcttgaaagtcggcgcgtcgttcagggcacgccggagcttccactccgccagggcgtgtgcgacggtgccctgctcggccgccgccgacgtcgagtccggctcacgggattccagcaccgcgctgggtgggcagttcagccaccggtgcgcgcccgacgccgagagcagcgcatgctggtcaggcatcggacagctccttcgccttggccagcagccacccgtacttcgtcgggtcaaccgccgacagcttgtccgcgccggtggcgacgatcagctcacgcacctgctcggtcatgccttggctggagagcccggcgagcactccacgcacctgcgccagcgacaccggctccggctcaggtgccggttcgggtgcctgtcggtgggcggcctcgtactcagcggcggcctgctccaggtcgggttgtgcgagcccggcggcggcgatcggacgagcgccgggcatcccggcgtgatcctcgaacccctcccacgcggtctcctcaattgcggcggcgagcatggtgacacctgccgcgtcggccagcgccatcaggtcgtcgtcggtgtcggcgacacgcacctcgacggtggaggcttcggagccgggcaggagcacggccatgcggtgctggggtcggctggtgccgaagatcgcgcgcagcatccgcctgctggggcggatttcttttgcagcgagtgcggcagccgggctgggatgcttggcgatcttgatcttgagcttggtgggcatccgggtttccttccatgtgagtggtggtacgccccatcaccgggctggtgaagggagtgccttgcatctgtcaggcatgggacgcaccgaaaccggacggcctacgactcggtgagtgttttgcgcagttgggccagaccgcgcgagacggctttccgcaccgcatcggcactggtcggctggcctgcgccggtcttgtcggcggcgatctcggtgaaccggtcgccgtggagcacatgcagctcgatgtactcgcgctgcgtcgcagtcagcggactcagcagttcgaccaccgcgaggttggcctcgacctgctcggtgaagtccggatcgtccgaggcgaagtaatccgcgcccagcccgccacgctcgtcgtcatcaccgtggccgggttggtcgacggagatgtcggagcggcggcgattgtccagctcgcggtactcggcgtacacgtcgtcgaggtaggcgcgagcccacttcggacgcgaagccgggtcgcgcagctgggcacgcagttcttcgctgtcgggcaggtcagggacgggtaggtcgatggtgttgcccctgggggtcaggtacgggacagtgaattgtctgttgaatgccacgtgagggcttcccttcttgcgaagggagaccccgttgagggcaaccgacgagagaccgtggtgttgagcggaaacagtgacgggcaccaacccgacccgggggtgaacccgggtacaggtggtgcccgtcaagcgctcaacggaggtctcccgaatacggttgaaaaacgcatgcgggtgtaggaggaaggcggccggccggtgaccggtacggctttgaccgccacagcggttgggctgtcctgccggatgacgtctggccagcaggacagccgtgagggctacttgcccttacgcggcttggcctgagccagcgccgaggctgcgaccgacttcgtcttggccgaggtgcgaccgtcgcgcagcagtgcggacgccttcttggcgaccggtcgagacgtctgcttcgtgtttcgtgtatccatgtccctgttcacctcctgcctcagctcgctccgacacggttacgcgttcatgaagatgaacgcgacaagagtgaagcggccttgtaagatcgaaggaacacaggttcgctgttcgcccttgtggttctaggttccccgatgacggttttctgatcggctgggaagcgatgggcagcgatgggtcgcgatggagaggcggtgcggtggattacaagtcgagcttccacgccgtcttggcgacggtgcgcccgctgatgaaaggcacccgtaaccttggcgagttcaccgcaggtctcatcgacatgggactcgtgcctcgcggaaccgtctacggcgagaagaccgcgcttgagatgcgcaagtcggcgacgtggaaggggtacgccaacgggtctgaccagctgcctactgtgttagcgagcgagctggctgggcgatgggatcagtttcggttcgccagcaacgtctcccaggcatacgaggagtcggcactcaatgacctagccgaccggctccacgaccttgacgagtcgatcaacaagggcaatgtcaccgaaggtctaggccagctgttctacaaggtgttcaccgaagctgccggtgagaccgctgccgtaacggagcccttgactttggcagacaaggccgaccgatctggcatcccgtacattgacgagaagacgaatcgcctcaggcttggcgaccgctcggtcgcgttaccgccgaagcatcccacaccggacacagttcagcctgctgagctggggtatgtttcggcgctcctggccgcgcattgcgaagacaaagcccgtaccggcgttgaggtgcagctggacgacatcccgtcgcgtctggttcaacacttccaagaacagcgcaaagcgttctaccgtgccgaatgggtacgagaaacatcgtggaactgcatccacgatgggcggccattgtttgacgagttcttggaaacgatgcacgcgggagtctccgacaccaacttgcgtcagtaccccaacggactcgaacgcctcctcgcgacactggctcaagcagccgcagtccaactcgacggtgtccggctcgaccagatcattgacctgatcgacgtgtggagccggaaaggttcctgccacgaactcgtcgcccggaaccggctgggatgggtagattgatgcgcgccacgtccctagacacaagtttcgaagctgaactgcgcgggctcatcttgctgttcctgctcggagatgcagcggatgccgactacctgggtgccctagacaccatcaccgtcaacgcccacaccttcggggtcggggcagagaacctcaacggcacccaccgactggccagcggggaactccacacgcgcacagtcctgatgacccaagctctccagcatttggcgatccaaggattcgtgacactacagccagatcgttctccggcggccttcacgattaccgctgagggtgaatcagtcgtcaaccatttccgctcccgatacgccggtcagttgttcgacaccgcgttggagacgatcgagcgggttggcgacctgagcacgagcgagctggctcagatcatcaggtcagcgaccccggaaggagaaacgcgatgacaccaggcttctggatcagcagcatcaccgtggccgggcaccccactcggcgggactccagcgtcggtttcgaatctggactcaacgtcatctacggaccgtctaactccggcaagtcctgggtgcttcagtgcatcgactacgtgttcgggctgaaagccgacgagttcgtcctcgacgaaaactccggctacaccgaggtgcgtatgggggtgcgcaccgcgcagggctcactcacgttatcgcgccccatcggtgagggagccaataacatcgaggtctccagcacagacccacgaattgagtctggaacctacaaacgtcaatcgtctggccgttccccgctactcagctcggtgtggctcaaactcatcggctacgacgcccctgaaaacctgaaaatcatcaagaatcaaaaccttgaaacccaggcgttgacgtggcgcaccttctggcatgcgctgtacgcggatgaagaccggatcagcaccaagaaaccaatccttctccctcttcagaccaccgcacagcccgcgttcaaatgcgccctagcgtcactgatcaccggcaaggactatgccgcctacgctcgtgatgagtctgtcgaaacgaggaaattgcgtaacaacgcgatcatcgactacctcgagccgctacccaaacagcttgaagaacgaatcgagttgatcgacaaagcactcggtagcagcgacccagcagagatccagcagcgcatcgatgagctgatcgcagaactggaacgtgtccagcaacgcatcacacacgccaccgtgcaggggcaagacgtcatcgcacgcctccaacaggtgcgtgactcgctggcggaatcccgcagtctgcggaaccgatacgaggaacttgccgcctcctaccgtgcccgcatcgagcggttcgatttcgtcgaggaaggccacgccctcaccgcacacagggaaccggcaacaacctgccccgtatgcacgcaggcactaccaccggaagcgcgatccgcagttccagagcccgatctgcgtgaacgccacgacctagctgcccgactcaacgatcttcgtcaaacgatccatcagatggatcttgaacaggcaccactgcaagaacaagagcaggatctcgccgcagaagccgagcgcatcgcccggcgcatcagcggcgagttagagccgcaactgcaagccctctcgacttcgcttgccagccacaacgcgatcatcgccatgcaggcagaaagagaacagcacctcgaacgcaaacaagccatcgaagacgaacttgaagaacgcaagaatcgcacattccccaagggcaacttcaatccgctcgacgaatacccgaaaacgttctggccgcagatgggcaccaacctgctcgacatccttggagcctgcgcgttccccagactcaaagatgcccgattctcgcgtgaactgttcgatgctgtcatcaacggcaaaaccaaagcggaggaagggcagggctaccggtcgttcgtcaacaccgctgtcatgctcgccctccgggaatacctcgcctccgaggacgccacacacaaccccggcctgctcatcatcgacaccccactactggggctcgacgatccacagctcgaccccgagcttcaagaagcccgtgaaaccatccccgctgccctctacgactacctcgccctcgaacaagacggcggtcagatgatcatcgctgacaacaccaagttcatgcccgacatagaaccactaaaggaccgatgcaaactcatcgtattcacgaaacgcgaaggagaaggacgctacggcttcctgctcgatgcccaggacgaagacctgatcgatctggaggaaacagatgacaactaaccgcgccttcagctacaagcccctctggaaactcctcatcgaccgcgacatgaacaaaatccaacttcaagaacgtgcaggcatcagtccagccaccctgtccaaactcggacgcggcggcaacgtcaccaccgacgtccttgcccgcatctgcgaagcactcgactgtgacatcgccgacatctgcgaggtcgtccccaccgacctgaagggagagaccgactagatgaccgctcaacgcctgcagctcacctggtacaacaaggacaaggctctcatccccactgagaccggcaagtacggctacacgtgggttgacccctctgatccgcgctactgcgaaacccacaccctcgtgctggacgactatgtgcaaggcagccagacaccgaagtctgacgagttcgcctactccgagcgcgctgacctggagccccaggatgacaacctgctgatcttgggtgaatcgggcgatgtcctcgaagccctcacccgcgtgcccgagcttgccgagaagtacgtcggcaaggtgaaactgatctacatcgatccgccgtttaacaccgcgcagacattcgcttcgtacgaggacaacctagagcactccatctggctgaccatgatgcgcgaccgactgcaccacatgaagaagctgcttgccgacgacggctccatctgggttcaccttgactacgcggagaaccaccgtatgcgactgctgctggatgaggtcttcggttgctcaaacttcattgccgagttcgtgtggcagaaagcagactcgccgcgaggtgacgctcaacgtgtttcggtggatcaagatgtgatcctttgctatgccgcgagtggaagcacagtcatgaatcgtatggaaaggactgccgcagataacgcccgcttcagtaatcctgacggcgactctaaaggtgtttggttcagtgataaccgctccgcgcccacaaacgttatgtcttggcagcaccctagcacctttgcaattcagcacccaatcagtggcgagatgatctacccggccaagggtggatgctggcgttttggtagagaacgtctccttgagtcattgaacgagtacgcggagtatgcaagcggtgatgtagacattgcggctcgggttgcaaacacatcgcttcggtcagatcaggttcgttcagacattcctgacctggtattggtcgaccccgcttcagcggctcaatgtgctcgcacaagaattgatgatggaaattggccagaattcttcgtgactgcaaccagcttcggcagaaagtcctatcctcctaatgaaggtcagcctgcccgttcatggtggcctaatgatcaggtgggacacaatcgcgaagctaagtcagaaataaaggctctcttttccggtgcgacgcctttctctacccccaagcctgaacgtctcctcgaacgcatcattcatatcgggtcgaacccgggcgacattgtgctggatgtgttcgctgggtcggggacgacggcagccgtcgcgcagaagatggggcggcgttgggtgacgtgcgaattgctggagtcgacgttcacaacgtttacgcgtccccgtctggagaaggtgctcaacgatcaagacccgggcgggatcactcggactaagggcgaacgagtcgacgctacggaagacgggctgcctgatggtgtctcgccggaggacgccgcgaaattcacgagcgtgctcaacaagctgatcaaggacgacccggaattgaagaaaagcatcgaggtgaagacactgaaggctgcctcgaagaccagacgcacgaaggaagtagtgaactggcgtggtggcggcggcttccaggtcgcccatctgtcgcctgcgtgtttcgactacgcccctgaactggaccgggtgatgctaactgcggccgcgaccggacagactctgatcgagtcggtgactgccaacctcgggttcacactgttgcacccggatgatgactatatttttgatgcccgccgtggcaatgccttgttgaaggtggtggagggtgtggccacgaccgagatcgttgactggcttgcttcccaaatccagcccggcgagacaatcgtgctggccgccaccacggtgatggacggcgtgcgccagcatctgcgcaaactggtgaaggggtcgcgggtggtcgcattgcccgatgatgtgtttcggtacagcgaaggtggtgaccagtgatggcgaacaggctcaacatcagttttgactccgacatgctggagtcgatcagtgccgagttcgacctgcgtgctccgaacaaggaagcactgcgccagctggtcttcactctcgacggtgactatgacccgaccgtgatgcaggtgctcaacctcgctacgggcgtgggcaagacctacttgatggcggcgtttgtggagtatctgcgccgccaaggtgttggcaacgtggtgattgtgacgcctggtaagacggtgcaggccaagacggtgcagaacttcacgcctggttcgtcgcgctacattactggttcggcgcttccgccggaggtggtgactccgcaggattattcggcgtggatcgcgcgtcaaaacggcccggtgcaactcgcgttcgggcgagagactccgatgttggcattcattttcaatattcagcagttgattgcccctaagtctgatgagggtgacactttgggtggtacgcaggatgcgatgcggcgtaagcctcgccgtttcgatgagaacgccggggtgcttttcgattatttgaagggtcttgatgatctggtcgtgatcgctgacgagtcccacctgtacgggtcgagtgcggtggcgttcaatgcggctttaagagaactggatccggcggcggcgattgggcttactgcttcggtggataagaaaaccgatcacgtgatctatgagtatccgctgtatcgggcgatccaggacaaatacgtcaaagccccggtgttggctttccgtaagagtgggtatggcacggacgaggcctctgaggaacagcagttgcgggatgctttgcagctgcgggcgatcaaacaagcccactatgatgcttatgccgccagtgaaaaccgtgctcacgttaacgccgtggtgttcgtcgtgtgttcggatgtggaacacgctacccaagtagcggagcttttgcgtaccccggaatatctcgggcgtgacgaggcagtgttgcaggtggactccaaacatgaggacgagctgacgcagcgccgcttgaacgagctggacctgcccggctcgcccgtgttggcggtggtgagcgtgaacaagctcaaggaaggctgggatgtcaagaacatcgcggtcgtcgtgacgttgcgggcgatggcttctgaggtgctcactcagcagacgatggggcgcgggctgcggctgccgttcggccggtatacgggtgtgtggcagatcgaccagctcgacatcatcgcccaccaatccttcaccgagctgctcaacgccgagaacgtgctgcagcagttcggcctggacgaagccatcgccgagcccgacaaagccaaggtagaagaggcgatccgtaaagccgccgaagagtccggcacgggtacaggtacgcccacgaccggcggtgaccaaccaacgacgacaaccggttctgaaccgggcaccggtgtcagtggtgaggtcgccggtggtgtggctccgcagccgggcaccgttcccgtcggcggcagtgattccccgggtgcgggtttgcccggtatcggggttcgcaccatcaccgaacaggaggatcagcccacctgggagttggtttcgatcggacggaacccgagctttgctgacgtgtcctaccgattcccggtgacgacgatgactgtgcagcagccgcccattgacctgtcagaaatcagtgacgccgagattgagcaagcggcgcgtcgggtcacctctgctggggacgtgctgctgcgcaaagagatcatcgccgccctaggcaagaaactccgggcagaggatcgagaaagcgccgaagtcgactccgtccacgtcgacgacgccgacgccgaggaggcgctggtcaaactagtgatcaacatgtcgctggtgcccaaaaccgaacagaccgcccgctacgtcgccacgttcctggtgccgaagttcatgcgcaccgtgacgttcaccggctggaccgtcaaatccctcgactccgcccgcgccgaactcctagcgctgatcaagaactacacaaccgagacactgcgagccacccgcgaggtgccgaccatacaccccaagtcgatgccaggcaccggctacacgctcccgttgggtgagaaggtgcatgaccagatcgagagtcgtgaccagttcgtgcgaggccgggtctacggcggctggttcaagtcgctattcgccgaggagtccttcgactccttcaccggcgaataccagcttgctcgcctgctcaacacgtcgccggggatcgtgtggtggcatcgcctgcatccgcaagaccaggcattcgtgtactacaacgcgaaagaccgctacttccccgacttcgtagccttggacaccaacggggtgcattggatcatcgaaggcaaggacgagcgcggccgcgatgacgccagggtgcaggccaagcgtaaggctgccgaggcgttggtgcgccggttggtggctgaggatgcctacgccggtcagcactggggctatctgatcgcctacgagcaagacaccgcccgtgccgactcgtgggaagacctgaaagccttcgccagcccggtcagcaacgccctgtagctgcgagttcgcctgggcgcatcacggggctccagcgttgcgggaggtcgagggtgacggcctcgccggtgatgaacacgaatccgagcctgccatcggtgagcatgcagccgccctccagcatggcaaggaagtccgggatgtggagcgcaagctgggtcggcgattcggtcaggagcttgtcgatcgccgtgtggagcgtcgatgggcgtcgccgcgcacccgttgactgcaggctgtccacggcctggtcaaccgccgtgctgttgcgcccagcgagcacctgcaacgcctcggccatcttcaccagcagcacctcctggtagaggtggctggtggtgcaggtgccgcgcttgacgtagttcgtggggcactcccacacgtcgacccggttcggggtaccggagtgccaggtcttgtggccgaacggccgtccgcagtcgccgcagacgatcttgcgggacaggcgcttgccgaaggacttgtagccgcgtgggtcgacgcgggtgcccagccacggcaactcgcggtctgcaatgccgagagcctcggcggcgtggcgttgggcgtggaatgcgtccatccactcgacggtgtacccggcggcgagattttcgaggaggaagctggtcagccggtaggtcagtcgggcttgtactgttgcgagttcggggtattgcatggtgggggctcctgtctttgcgtcacgtacatacacgctctgatcagggctaatagcaagtcgtaaacggcgataccttttagcgcttgccgaactatttggcgctccgttgtcagcctcgacgcacgtggttcacgccgccccacagcgcctctcggacaagccagccaccggagccgatccgtccgaatatgcggctcgacggtcaacactaaggcgcgttttacctagtggggagcgggtttcgccccatctgcgtcatccgcgcaccacaaacccctgtatccacttcgatacagtctgc

SEQ ID NO: 68 - DNA, 32951 bp, Propionibacterium acnes
ggtggtgccgaagaagaaggaatggccccaccaatctgctggtcggtagaagtacggggtttgagccagtcgagtagtttcataatctgctccttgcaaggtattgtgaaggatatgaaatctcttacccctcatttgcttctctgctcttttttcacaagcattgctcctgccttaggagaaggatttcgcaacaaacgtgtggctttcattccgacagcagcagcccacgaggagtacacagcctacgtggattcagcacgctcatcatggaaagaacttggcagcaatatcaccgatgtggatattgccagaatgcctctaagaacagcgaccgaggcgcttgagcaagccgagataatctatctttcaggagggaactccttctacctcctcgattgcctacgctcaacagaaatcgaccagattattcgagggcgtctggccgaaggggcgattctagttggtgaatcagctggagctatagtttgtagcccaaatatcgcctacattcagccaatggatcgtgtccctgacaactacagccaggctgactacaccggactgaacttagtggacttcttcccggtacctcactacctcgcccctccatttgtgaagagttccaaggaagtagtcgcccagcacgctagcctcccactcgagctcatgaacaacgcagaagcggtaatagtagagggtccccaaaggacaaagatctcatcagagcaccagtagtcctcgtgagtcgtacaccgacgtgcccgtgtggctgccaccgcctcggatagcgcggtcgagggccatgatggtggcgaccacctcgtcgatcttctcggtggacttttgcttgtcgggtttgatgtttcctgccgggtcggtgcggacgtgaatgttgtcgaccatccaggacagcactgggtgcctgccgtgagcgagcctaccttctagtgcgagtctcatgagctccttggacggtgggctcatgtctttgaagccttgcccgaagggcacgacggtgaacccggcatcgtcaaggttttggctcatctggactgcgccccacctgtcgaaggcgatctcgcggatatcgaagcgtgtcccgagttgctcgatgtggcgttcgacgtgggcgtattggacgacgttgccctccgtggtctctaataagccctgttggtgccacaggtcgtagggcacatgataacgcgccacccgcaacgccaggttgtcctccggtatccagaaccacggggcgatccggtacttcttcgtccccgtagggtgggaagatgaggacgaaggcggtaatatccgtcgtagaggcaagatccagcccgccgtagcagcgtcttccttccagctcgtccaggtttaccgggtcggctcccgcgtcccagatgtgcatgggcatccaccgcaccgactgcttgacccactggttcaacctgagctgccggaacgtgttctcctcggcagggttctgccgggccgagttgcacgccgcgcgcaccttgtcgatcggcaccgtcacgcccagtgaggggttggctttgcgccacacggcctcatcggtccaatcatcatccgcgtcggccccgtagatcaccgcatagaacgtcggatcatacttcttgcccgcgaggatgtcctggactttctggtgctgctcatagcaaatcgaatgcgtatcagttccggcggtggtgatcaggaaatacagcggctaggtgcgtgcgtcgcccgaacccttggtcatgacgtcgaacagggctcggttgggttgggtgtgaagctcgtcgaagaccacgccggagatgtcgaacccgtgcttgaagtaggcctctgcggagaggacttggtagaaggagttggtgggcttgtagatgattcgcttctgcgaagagaggatcttcacccgcttcgacagggctggtgattggcgcaccatatcggcggcgacttcgaacacgatcgaggcctgccgccggtcggccgcacacccgtagacttcggcacgctcctcaccatccccacacgtcagcagcagggcgacggcggcggcaagctctgatttgccctgcttcttggggatctcgacataggcggtagtgaactggcggtagccgtcggctttgacggtgccgaacaggtcacggatgatttgttcctgccagtcgatgagctggaagggctgtcctgaccagcggcccttggtgtgtttcaaggcttggatgaacgcgaccgcgaagtcggctttccgcttgtcataggtggagcctgcggccatgaaccgggtcggcgtgtaggtgtcgagagtgcgcatcacgcccgtcaggctccttcctgtgctggttagttggtgtgggcgaaggcccaggcgatggcgtggccggcgtcagcgaacagttcgtcagcctcggcgaccaggtcgagttcgcattcactgaagcctcgggcgtcctgtccccagccggagatcggctgctcggcgaacttgtagacgcgggcgtcgtttccgatccggcctttgcccaagtgccggtaggccgaggcgaggacgaagtccccgtaggcgatcaccgtgccgtagctgtcggtcgccatctgcagctgctccatcgtggtcttttcgttgttcatgaccttctccttcttgccttgttcggtcatgtacatacagccataggtgcgcgctcttatccagtcgtaaaagccctagtcagcccactatttttgaggaatctttgaggggcgacgggcacggaaacggcccctgattgggtgggtacccacggtggcttggggtcagtcgatggccaggtgccaggcggggatcatgcggcgttccccggtgatcgggtctgggtagcggtcgttgacttgggtcatgcctcgcagggttgcccctgcctgggtgaggttccagatgatcgtggtcaggccggtctggttcgcgctgatcgtgaactcgccgatgctgtgctccttgagttcgtcgaggatgctgggcacgtctgagtcgtagagaccttcggcgaagtcgagcagctcgttgcccgcccgctggctgttcatgtagacggtgagcaggctcgtggacgaggtttgggtgcgggtcgcgatcttgctggtcgaggtcgtcaattgtgttcatcgcgggtgtccttgtgggtgggtggggtgcgccaggcggcgttgccgtccaagtgtttgagcaaggtgcggcggacgggtttggtgtcgtcgccgatcagaccgaggcgcagcagccagcagcgcatcgcatatttgtcgttcccgcccgtttcggcaggtttggctgaggctcttgtggcggttttggcgtggtcgatgatccgggcgatcagcaccgtggtggcctccactacctgcgggtcgggcgctacgtcgaaccaggggaactcgaccgtcccggcctcggcgtcgatgctcatcggggttgcggggatctggagtgctttggcgatgagctctcctttcgctgctagcgtcgcctccaccttccctttcgtggtgtcctcccaaccggtggtggggaacgccaacgtcaaccccaactcgcctggctcgtcggtggtgtccgtcgggaatccggcctgcgcggccgcctcgaccagcccggccacgtcggtgtcctcgggcagatgcagcagccagtcacgatccaacatggcctcgccaatctggtaggcaaacgttggggttcccagatactcgacggtcgctcgcagctgggtggcgagaaaagcggcgagttgcttgcggcctttgcgctgcttggtgaacttgagtgtcgtcatgaccggcctcctttgcgtgttcccctggtcggagtggttttcggtcatgtacatacacgctctatcccgaccagatagcaagtccggacggccacctatttcttgcctcgatccacggccttcaccacatccaggtaggccaactgttggccgtcgcgcaggcaggtgatacctgcggcgtccccggtggcgtcggcgtagcggcgcagaatgactgaggcgtatttctcgtcgagctccatgcagtaagcgatccggttggtggcctcacacgccatgagcgtggagccagagccggcgaacgtgtcgagcacgatcgcattcgcctgggtggagtttccaatcggatacgccaacagatccagcggcttcgaggtcggatgatcagcattcctgcgaggcttatcaaaccgccagacggtggtttgtttccgatccgcgtaccacgtgtgcttgcccgtcttcacccagccgtagagaacgggctcgtgttgccactgatacggggaacgacccagcaccagggagtccttgacccagatgcaacaccccgacagcttgaagcccgcgtcttgaaaggcgcgccggaagttcagaccttcggtatcggcgtggaacacgtacgcggacgcgcccttctcacacacgcccgccatctgagtgaacgctgcgagcaggaactcgtagaacgcgtccgcgctcatcttgtcgttcttgatcgacaagccgtcagacgattcgaaggcgacgttgtatggcgggtccgtgagcaccaagttggccttcttgccatccatcaacagctcgatgtcgcccgcgttggtggcgtcgccgcacaccagccgatgcctacccaccgtccagatatcaccccgctcgacgaacgcggcagcctccagggcggcggtcagatcgaagtcgtcatcctccacctcgtcctcatccaaggagccgatgagctgggcaatctcatcgtcgtcgaacccagtcagctcagcgtcgaaatcactcgcgtccaggtcggcgatgagcagggcgagcttgtcctggtcccagtcgccactgatcttgttgagcgcgacgttcaaggctttttcgcgggtctcgtccaactcgacgaccacgcagtcgacagtggtttcaccgaggtcttcgaggactttgaggcgctggtggccgccgacgacatggccggtggtcttgttccagatgacaggttcgacgtatccgaactccgtcagcgaccgcttgagcttttcgtagtcggggtcgccgggccggaggtctttgcgcgggttgtagtcggctggcgtgaggtcagcgatgggtagctgctcgatgcgcacggggctccaccgccttccgcaggtcgcgctcaaaacgccaggtttgttcccagcgcggccaatcccggcccatgtgcccgtagaccgcgagatcccggtaacggggtgtgcgcaggttgaggacgtcgatgatccccgccggccgcagcacgaacacgtcacgtgcggcggcggtcaagatgtggtcggcgtactcgccggtgccgagcgtgtccacctcgaacgcgaccggatcagccttcccaatcgcatacgagatgcccacctcgcactcagcggccagcccggcgtcaacgatcgtacgagcgatcaggcgagccatgtaggccgctgaccggtcgaccttggatgggtccttgccggagaacgcgcccccaccatgagacccgagcccgccgtaggtgccgaccatgagcttccggcccgtcagcccggtatcggctcgcggcccgccctcaacgaaccgacccgacggattcacaagaatttcggtgtgctcgtctatgggtaggtaggtctggcaggccggggccacaatcagcgagcgcacctcacgctccaacacggccagatccttgcccgcctcatgctgcaccgagaccacgacggtctcgacggcggcgggggcaccggtgtcgtcataacgcacactcacctgggccttgccgtccgacttgatcccgcagatcgtcccctcgacctgggcagtatcgagacgctcgcagatgcgatgtgccaggacgagcgggagcgggaggcgttcaggggtctcggcggtggcgtaaccgtagaccgtgccctgatcgccagccccctgcaacgcgaacgccgaactatcaccaccgcgtgcctccagcgaggtggtgaccccggcgttgatgtcgctcgattggcggcgcgtccacacgtagatcaggatcccgagcggactgtatccggcacgcgcgagggcggtgcgcacagactcccggatacgcgggcggtggttggtggtgatttcgccggtgacgatgatccgccgaccggctgccatcacctccaccgccacccgtgcggccttgtcgtcgtagaggatgtcgtcgaggatctggtcggcgatctgatcggccaacttgtccggatgaccagcacacacagactcggcagtacgaatcgaacacataagcacactcgcttccacgaatcggaggggaacaagaaagcgtccaccccactagagggtggacgcgaagatcatgaggggcggttaggagcgggcgttgagcagctgctccatcacctcgtcgccgggcgtggtgcccgcgtagtcggtggtgcaggtggcgcgcacgatctcgtaaatctcgtaccaatacacattcgcctgcttcccgaaactctgggacatggcgacaaacgggctggcgatggcggcaccggtggtggggtgcttgccgagcaggccgaacttggagatcgcctgctcgcactgcacataccgggcaaacgcctgcgcatacgcctcaatcaggcgaggcgccacgaattgggaaccgccacgttgatcgagccactgccacgtctcccgatagacgaggtcagcgccaagcggtttgccgtcacgctgaatctccgacagatagtccgatggttcgggcatcgtctccccggcaagcaccgcaccgtcgccaatgtcattacctgcgaagtcgaagggttcgttgagcgggtcttccaggcgggtggcggggcgtccggcggcgagtttctcgcccagcgggccgggcttcgcgcctgcacgcacgcggcgtccgcccctgttggtgccgtctttggccatgggtcgcctccccgccgtagaatcgtcatggtttcggtgctgaagtccacgggaggtgtgagtggttgagtctttaaaactattcgttcggacctacgtgtattgggtagggctcatccttggcttcgcgatagtgcccggttctctgctcttcactgctgaagtcgccccggtgaacactccattgtggcttgcacctttcgccgggctgctgctttttgtcattgatcggccatcaacatgggagccgccgctctggcgagcattactgatccgagtattgggtgcaggatttgcagccaccatgctcatcgcgtttgatgcagttgcttccacccactatggatctcaacactggagtgagacgctcctatctttcggtctcggttggattgtcttcacggtagtggcaggacacatgctcatgagcagctccgcccgatttggcacacctgctcacacgatcagggacgcgatccgtacctacacgacatggataggaatctgcttcgggattttctatatccccgccgcgggactctccgcagctggcactcttttgatggttcttccgctttatggaacgttcctcgccggcctggttcttttgatagttgacccgccacgacgatggccgcaaccgcgagtgaaggcactgtggatacgactcttgtcaagcgtggcagcagcattactacttgttgtcacgaactcgttctatcgcagtactcgcacacacgagattttcgtcggggactggcaggaaaacctggtcttcttcgtgggtgcttgggcactttatgccgcagtggctggggccaggtatcttacgcctggccccagccacgaagcagatgacaaactcagtagatgaattcagctagagcttgacatgctgccctcttggtttcttcgctaggctcaacgcccgagtagccgtatgccccattggaaccgtctgtgagaaggccaacgtatctgtcatccaatgggccatcaatttctgcaaagaacttgtcctttgcggttcctccgtcgcttgcaccaacactctcagagatcgccttgaatcgctgcaatagcgaaactggattgttgtagtagctcctcagcgttcgggacagaaggttggggtcgtcggctcccgagcctttcagcatcgcagccagtttgatcgcatccccgtcgctacacaggtcggagtagttgcagttgttcggcagatcattggggatggtcaaaccttgaagtccgctgtgattcttatagttatccccttggccaacaagagcccttgctattgcaataatgtttgagccgggattcaggtcaacaaccttttgaatcggaccgagcgctgaagctaagtcacccgcccatcccgtccacttatcaggaacgagcgggttcaggttgatgtagcccagggtggtcacgctcatatgcgggatatctactgcaccacctgcggggtccgtccattcttgtcgatcggagcgaatccacttattcaaggcagagattatctgagacgcttgagtgtcatcttccagccttttcgcgtccgcctcccgatatgcttcagctgccgcggaccactttgcgcttcccttgaggtagaccgttgataggtagttgaggacacatcgccaagtcggaactttgacccaagtaacgtagctgccggatgtgatcggatcctctccgaaagcgtagtccttatagaccacgcgcaattcctcgaaccggctctcaagcgcttcgatcagatcgagaaaatctagagcgtcgtaattcactggctgcgcgtggcgcaccgacgaatcggctgacatgcgacccgaatatgccacgcggtcaagatcccatttcccccgatatccactgatttcgtggaactgatcaaatacccagttgtcggggatggggaaaccgagattacctgagaatccggtagacatgtcagaaacgaatgatgctaccgcgtatccagcctgagctatccgggtgcagatgtttcgcgaggcgtagatacccactcggtagccgccgccgaggctttgcgttactgccttgaagtagggcaggatgtggctggtcacctgaggatccgtggcatcgtagtcaacggcgaagtagatcactgtaggtggaacaccaagtcgttgggcagcggtttgggcctctttcgcatgacggtgcccattttcgacactaaagtacttaagttcagttgagtactcttgaaaaattgggaaatacttcagcccatgaccaacgattcgctctagctcgcctgtgcggagcgccttgaaatagtctgcctcagacttactgctttggttgggttcactgagatagcggcctacgatctgataaccatcagccttaagatgtccagcaagctcgtcagtgatctcaaagcgcgtatcgcaagccacacatggccgattggggtcgcctttagaagtgagcaggctcatccatgtggttgggtcgaccaccccggtcactggcaaggcgtgtgcttgctggaactgccacagcgtgttgctgatttcgctgttccacgtgctggtcggcaaaatggagtagccgttgcagaccagactcacagtggctagccatacccactggttagtgccgctactaattgtccgtagtttggagcgagtgcctgcaccaaaattcccggtggcttcggcaggtgtgtatccttcgattgcttggaggacctggattaaagccgtgttcatttcacgcccgtacaagccatcagtgggaatgatccctgtgtagttcttgtacccacggttaatcgcttgctgtgcctgacgaatagctgtcttgccgccgtaggcagagagtaaccggaactgtttcattgacagaagcgccatcattagttcaacatcgaccgttgcgctcgtatcgccaaggccaatatcgactttcatctggcgaatagagtcggccaagtggtcggtaaactcaagagtgatgccaccgtattcggctcgatatcccttgcaccacaaggctccttgaataatcccatgaacattgtcgtagccagaagtttgagtaatgccgtttggccaacgagacttgaatcgagactgtgttccagaaccgaaattgtttgccgtcgctgtaatacccagttcgatttgcagagcgcggatgagtgcgttgattgtatcccagccagtgttaccggtttcttggactgagccgaacccagttttattgccgtaagtcgaattcagccactgctgagttttcagcaccatttgatctgccatgattcctccttcagaaatcagttgttaactcgaggcaggcgaacacctgccacggaggggtccagaacaccggatgagaagctccgagttttttgccctcgcctgtacgtcaccgggaaacccgaatccggacggcaagagcgaaacttcgcgagtttcatccctcactggtactgccgacgaagcccgaagtgttaataccctgtttgattctgggactttgcgcgcagttggccccgcccgctgacctgtccgagcgtcgtagagatcgagaggccccaaccccctcgccagcgccgccaggttcccccgtgtctgccgatcagcaccgaggtgggcatctttgaggtttcgcaacctcggcgcgacgtggcgcgacgtggcgcagatttcagtaggtgtagatcctcggggtctgcctccaccggtcgccgtcgagcgccgactggcgggagtggcacggcttacacaaactgcggaggttggcctggtcatgggtgccgccgtgctccaacgggatgacgtggtggacttcctgcgccggggtgtaccggccagccgcgaggcagtcctcgcacaaggggtgggcggtgatgtaggcggtacgaatcttgcgccagcgggccccataacgtcggttgatcttcgggtcacgctgccacttgcggtagcgctcgtcctccgccttggcgtgggcttcgcagaagcgggcgtgggtgaggttcgggcagccgggctgggaacacggacgggcaggcttgaccggcatcacgcacccctttcccggacacggcaaagccccaaggcacccagccgatgaccgggcttgccctggggcttttcctacttttcaaccacctacatcattgcaggcccgaaaccctaaatgcatccgcagttcttgacaccttttggcggctaggttcacgcggcctgcccatacagcgccgacgccagccgggcgagcgcccgagacttcttctggtaggcgctggtgcgctccacgtagaagtggtcacacaccgtttgcaccgcctcatcctgggtaccgtcgccgaggaagaatgcttcgagcacgaacctgtcgtcgtcggtgagcagctgccaggcgggcaggaaccacgccatgtactcacgcgcctgggcgtaacgggcacggtagatgtcgatccgatccaacgtggccgccacccgcatctccccagcatgcagatccgtgtggcggggcatcccgtcgagtttcgatgaggctggggtggtgacgtcgtcgtaggcggtcttgatctgctcgtcggtggtgtcgatgatctgctccatcacggcgaagtcctgcaatgcgctgatggctgctttgcgggtgtcgaggtatttggtcatcacatgcatgacgactccttcctgcttatggttgtgagttcggtggcgaccgcgtcgatcaatgcggcctgggtcatgtccttcgcctccagcgccttgaggacggcttggtcgagggtgccggtggcggtgaggtgggtgatggtgacaggctcggcctgtccttgtcgatacagccgggcgttggtctgctgatacagctccaagctccaggtcagcgagaaccacacgagcaggtggccaccggactgcagattcagtccgtgcccagcggaagcggggtggatcaggccaagcgggatgtcgccccggttccacgcctcgatgtccgccgacgtcttcagttcgcgggcttgtgggaagcgacgctggatgcgttcgcggtcgtgtcggtaccagtaggcgacgaggacggtttggccgttggcggcctcgatgatgtcttcgagggcatcgagtttcgccccatgcacctcgaccgtatcgccgtgctcgtcgtagatcgcacccgaggcgagctgcagcagcttgcccgacagcgcggctgcgttcgccgcatccaccacctgcccatccagatcaaccaccaggtcggccttgagctgctcatacacagctcgttctccggctccgagcaccacgggcgtggtcgtcaccgtcagatcaggcagcgtgaggtggtcggtggtgcgcattgacaacgtcatgtcggcgatagcgtcgtagatttcctcctcagcgcctgccctcggcttgtacgtgaacacctgcatcccgttgcgcttatccggcaggaaccacttgtcgcggtagcgggtgatgaatctgccgaggcgttggccgccgtcgaggagccggaattgcgcccagatgtccatgagcccgttggaggcgggggtgccggtcaggccgacccagcgcttcacgtgtgggcgcattttcaccaacgccgtgaaccgcttcgcacggtggttcttgaagctggagagttcgtcgatgacgaccatgtcgaacggccagctatcgccgtactgtctgacgagccaggggatgttttcccggttgatgacggtcaccatcgccgacttggccagcgcgtcgagccggtcagctttggtgccgaccgcgaccgccaccgatagaccttggaggtggtcccacttggctacttctgctggccaggtgtcgcgggcgacccggagtggcgcgacgacgagcacccggctgacggtgaagtagtcgagcagcagctgccagattgccgtcagggtgatgacactcttgccgagtcccatgcccaggaggatcgccgcttcgtggtggtcgaggatgaaccgcgtggcggtctgctggtagttatgcggccggtagcgcatcaagcacctccttgatgccgtccaccgagtcaacgaccagcgcggtgaagccgtgggcggccagttggctcatccggcggcgttggatcggccgaggcttcttgccgggggctttcacttcgacgaagacgacctggcctcccatcaggcatagccggtcaggtacgcccgtggttccagggcagacaagcttccagcacaagccgccggatgcctcaacggccttcttgagctgggcttcaatgtggtgttcgttcatggtcactccttgagtggtttcccacgggggtgacgactggtgacgggtggatctggacttttctaaaggagatatttttgtggccttagtaatagttcaatactgatcgtcaccggtcgtcaccctcatcgggtttagctgttgaattcgctggtcagagccagtccgtagacgtacatgccatgcttggacttgcgtcgttcaaacccggattgttcgagagtggcgttgaagtcggccatcggccgagcccacccgctggtggattgcgcccacgctcggtactcctggtacaggtcaccggcgcgttcggatagggacgggtccacctcgcagcgggcgtcgaggaattgggcgaaccagttgttctcttcccgatatgcgcttgaggcagcgaccacttgggcgggtggggtgagctggtagtcctcggcgtggatgagccgcgagccttccatgatccatgcaagtaccgctccgccggcggtctcgtagaggtggtcggcgtagttcttcacatcggagctactctcgatgaccgcgttgaacgggatcacgatgagcctgcgccagatgcccgcatccatcgcgcccaccctgggcaggtgattcgtgtagaggatgagcgtgtgggatggggtgaacgcgaacggtgccttgtatttcttctccgcgtagatctggtcggtggaggcgagttgcttgaccgtggaggtggataggcgcacgccttcctcggactctgcggcgatgatgagccgtttgcctttcgcttcggcaagctcaggtttgacgttccggttcccgccaatggtgagcacgtcggcggacatgttgcccgcatacgtgccaagcactctcgcgatagtgttccagaacgtggacttgccgttgcggccgtccccgtaggcgatcacgagggcttcgaccatgaccgtcccgatcgctgccagcccgacgatccgctgcacatacccgatcagctcccggtcggattggaagaacacgttgagcgcccggttccagatttctgcgcccgtgtcggtggggtcgagcgcggtttgtttcgtgatcagatccagcgggttatggtcacgtcgggtgccgtcacgcacatcccacgtgccgccaggcgtgttgaggagatacgggtcagcgtccagccgggctggggtggtcagcaacatcgggtgtgcttccctcaggcaggaggtgatcgcccgggactcgcggcgtttcaacacgaacgcctcgtatgccttcgcgtcctcaaatgcccggtaggcggcccgctgcggtgaggtgaaaccgccgagtgctttcgctttcgacgatgcggctgcgagcaccgcgttcgcgcccgtcaccatgagctcgtcgcgggctttctccagcagatgcccggcctcggctagttgccggtcggtcagttcctgggcgatgccttgcgcagcaggcgcagactcagaccacacaccgccttcgtagacgagccagtccgtggcctccgtaaacgccagacgcgacgagtattctgcggtgagcatggatgcctgcccgacatcggtgaagtcctccggccgcaggctcgtcagctccgcgtaggcttccggcgacagataacccggctgcgcctcgactttggcggcgaaccggcaggcgctttgccagatcgactccaactcgtgatccgacaggggcggttcacacagggacgctttccggtcgaacaggtcacgagcttgggcggtctgcccgtaacggatcaggacgcgtccggcgaagcgggagagggtggcgttgcgggagccttccccgatcacctgcgtggaagcgtcgaacgcggcgaacacgtcgatctcgtcggcctcatccagccaggcgtcgagcagctttgtgccgttgtggatggtggtttcggggttggtggtgccgtagatgaaccgtccggcatccaacgcctgcgggtcgaagaacccgaaccgtccagcgaggcggcgcttcaaccccgcataggtgtcggcgtcggtgaccgggctgattgggaagtagacgtggaagcgaggcctggccgacagcgtccttttcggcttctggtggttacggctggtggcggtcatgaactcaacccccgccatcagctcggccaggtcatctggggtgatccactcgtcggggttgtcggtgtggtcgttgtcgatatccatcacgacacagtccgaggagatgaagctcgccgaggagcgccggtcgccggtgtaggtggcggcgacgtgatccaaccacgccacctgctccagcgaggtttggtcggtgatgtggtggtggttcgggtaatggttattgtgcgggttgccgctactcgtggcggcgcacaaggtgaacggagtcatgcgggatgcacctcctggaagtcggcgtcgaagaagcggatcgggatatccatctgatgggcccagtcgatctccgcccgcatccccgggctgaccctgccgatataggcccacagctgctcgcatttcgacagcaggatgcggttgaaaaacatcgccagctcccgggcatccgggtcggtgtcatccatgaactgcggataatgcaaatgcggagccaacgggatctgacgagcctttaccgcaaacgcacaaaaccggcgggcaagctccacgttggctgctatgtcacccgagtacggggagcagatgtagaccaatgggcggtagccgtattcggcgagctggatttctttcagcgcctggtagcaggtcgggtcggggtatccgtcggcgttgcgcagcggaatacccacatcgatggtggcggtcatcaggcgccctgaccttcacgttcgatcaccggcagcaggccacgggtgttcttcaacaggtcgtagatgaacaggcgacccttctgcgtccagtacatgtgggtgcgggtcttgccctcgtcgtactcgtgcgtcttggactgcgtgtagccctgctcggcaaatttcgcgtagaggaaccagcgtccggactggtggaactgcacctgctcctcgcgcagaatctggttaagcttcttcgccgacagcccgtagtccttggcgatctctgtggcggtgatcagtgagggcgatgccagcacgatgtcgtagtacgacaccttcggtgccgcctccaacaaagcttgctcggcggcgagccgcttggcacgttcagcccggagcgtggtgatcgcccgctccagaaactcgtcgtcagcgagcagttcgtcgatggcgtagataccatgtcggcggatcgtcggcagaacctcgtcgaacacccacgtctcgaacttctgggcggcaggaagtttggaagtgacgatcagccggtacaggtcgccttcgctgatgaacctgacctgctgaaccccacctgctgtttcaagggggtagtgattcacgactcccttgcagtgacgtgccagagcgtccttcgtgttggcgtagccgagggctgtagccacgtccttgccgcagaacaggatctgcccgctagaggtgatggttcggattgtgccgaactcgtggttggtgaacacttgtagtccggtagccatgaccagctcctattctgagagccaagtagacaatcggcggcgcggggtgcgccaggctctcacctgtcaggcacggcagacaccgaaaccggacacggcttgaggaaggctctcgcccatacgcccccgagcaccgacaaatccggacgggtcagagggcacactggtgtgtgaacgtaccgataactccgtgccccgtgctcttgcttcggcgtcatcaaccaggtagccttgtagtcaacatgaccggttccgctgcccgcctcggtgggagtccagggccggtcttcgtttttcgtatcaaacaggggtgcgcgtggagcaggtgaagcagttcaagacctacggtgaacaggtcgaattgcttcgtcagcgtgggatgcgagtgaatgatccccagcatgctgagacgctgctggcgcgattgaactactaccgcttgtccggatactggtacccgatgcgccgtttctcccaaggcgacggcactgcccgagatgaattcgttgagggagcatcgtttgacctggtggtagccctctatgggtttgacgaacaattgcgccacagcgtgttcatcgagcttgatcgcgtggagttggctattcgaaccaagctcggtcacgaactgggtcgccttgacccgctgatctatttggatcccaagcgtttgagcgcccgggcacggcagcgaaacaaagacgggcgtagcgtgcacgaggtgtggctgagaaagtaccagtcggcattgaaagcgtcgaaggaggacttcgtcgcccaccacaaatccaaatatggcgggactctacccatctgggcggctgtcgaaatcatggattgggggatgctgtcgtacctgtacggcatgtcgcccaatatcgtgcgcaaacggattgccgagccctgcggcctaactggtcctcagcttgaatcatggctgaaatccttgaatattctacgtaattacgcagctcatcatgcaaggatgttcaaccgtgtttacgacatcaaaccgaaactgaacaatggcgtcaggctggctccggtagctgaaggaatgaatcgcgtgttcgggcagctctcccttatccaatacttgcaccgccaactggacttgtctccagccgaccggctaccgaagctgttccacacctacccgcacaatcccatcgtgccgttttctcgcacaggagcacctgacaactggcgcgagttgcctctctggtgcgtctaatccttgcggtagtagtcgcattcgtacccgtcggcgtcgagtggcagtcctgctgcccagtcgggtggggtcgtcatgagctggcaggcatcggcgatggtgaagccggagtcctcgggttcgtcgatgacgatttcgtcgtggacgtgcatgacaatcttgtgcccagcctgagcgacgagtgtcatggcgtggacgaggaggtcacgagcgactgcttggacgatgttctcgacgagtttcccgccgtaggtctccagccgcccccacttgcgtccggtcgtgacaccgctgtaggtgatggaggtgccgccccaccggttctcaccaagctggggcttcacgtaggccagccgcctaccagagggcagggtgatgaacaagatgccggactcggcagtgaagcgaaggttgcgcagccgaacagcctggcgggtggtgatggcgtcaagtgcggcctgctcgacatccgcccagagtcgcacgatgttggggttggctgcccgccaggcgtcgacgatgggtttgagttcgtgctcggccagccccatccgtagggcacccatcgccttgagcgctccgacggagccgttgtaaccgcaggccagcgtggcgatcttccccttctggcgcagctcagcgttgatgccgtgtttttcgacggggacgccgaacatgcgcgacgcggtctcgcagtagaggtctttgccgtcgcggaaggctgccagggtggatgtttctccggcgagccaggcgatgacgcgagcttcaatcgcggagtagtcggcgacgatgaatcggcatccggcgctggggatgaacgctgtccggatcaactggctgagcgtgtctggcacggagtcgtagagcagttcaagggcgtcgaggttgcgttgtcgggtgagggtgcgggcttggtcgaggtcgggcaggtagttacggggcaggttttggacttggacgaggcgtccggcgaatcggccggtgcgtcccgctccatagaactggataaggccgcgtgccctaccgtccgtgcctgtgacgttatgcatcgcctggtacttcttcaccgagcttttcgcgaggtcgccgcgcagctccaggacttctttgaccttgcccgtggcggactcgagggcggcttcgacatcagccttcgccaaggacgacatctcgcagccgtgggtggtgagccattccttcaactggatcggtgagttcgggttctccaacccggtcaactcccgcgcccgcgccaacgtggcggcacgatgctggtcgtccagggcgacggcagcgtctgcgagggtgtggtcgagcaggatgccggtgtcgttgatgcgttgatccagggcgtaggcgtcccactcggcttcgggaatcggaaacgatgagagccggtcgtggatcgcgagttcgacctcgacgtcgcgctggttgtagtcgatgaactgagcccagctggtcgagtcgctgctgggcaggttacgggtgccgccaccgttgagcacgctgggtgtggctggcgtgcagaattgcttgatcagccgcttacccgccgtatccttctgaacgtcaaggtcaagagccgcaccgaccgcatccaagctcatcggcagaccgagttaagccgaccacaccatcgtgcagcgccactggctcgggtcaagaaacccggccgccaacagctcggggtgatgacgctgcagccacgcggagagcgcgacccgctcgaaggcggcgttatgcgcccacttgaccacgcccgggtccaccaatgctgcgagcacctcgtcgggcagcccaccaccactggcgagatcgacgacttccaccgggccgccgtcgatcgagtagccgaagatgaggaggcggaagtcggggtgttcggcatacgggtagacgccggttttcgctaggggtgctgggctgaaggtttcaatatcgatagcgatctggcgcatcagggctcctggacagtcgggtaggcgaaggtgagggagccaaccggtgtttggtggctccctcactgctggggtgctacttcgggtcgaggttgtaggtggcgttcatcctgtcgagctcggccttctccttggcgatcagctcatcgatgcgctgacgttcgcggcgtttggcccgcttgtccttaatccagtagtagccccagaccatccagaacgggatcaggacgtagacccacacggcgagggtgatggcgttgaaacagtcactcatgattcagcctccttagttgaggaagtcgtcggccggcgcgccgaagtcggactcagcggagacgcggcctgcgccaaggggttcaccgtcgcggatcttctgaatgttgcccagcccgcacgccacacccttgttcccgttcgtgttgaacgcgtagaacgacagggagacgcgggcgtagcaacccgagtacacctcggaacggtcaaggatcggagagacgttctcgtccacaacctgcggcggagtgaggctgttggcgttgacgaagaagctgtttgcgtaggcttcgtcgtcacgctcggtatccccgtcacgcagcggcagcttcagagccgccttgttggagcgcttgcctccgaacttggccgtaccagcgtcgatcgccgcgtcgatggccttctcgatagctgtgatggtggtggtgtcggccttcgggatgatcagcgacacggagtacttgggcttgccgccctggatggagttcggctcccacacgtgagcgtaggagaggcggacttcgccggtgacgacgcgggtggggttgttggttgacaaggttgttacctgctttctgttttcgtgaattcggtttgtgcgctgtggatttccagcgcgggtcgtttgtcggtgtcagacacgagcgtcggcttacccacgggcttgaccacgaggtcgccgagcacctcgttgaaggtcttcttgtccatgagccgttccatcgcagtgagcgtgatgagtctgcggtcgtagatgtcggcgtacccggcagcttcagccgcttcggcgacggcgttctcctccgtgtacttgcggacagaccgtccggcgacgagcttgaaaccatcccagtgcttgccctggttcaccgcctgcgagagcgcgtaggcctccacatccgcagcccacgttttgagctgtggaatccttgtcagcacgtccgcaatctcgctgccggacagctcggccggtggggcgaactcgtgctgggcgagcgcgaggttggcttcggcgcgtgctcggcacgtcggtgcgatgcggcagaactggcaccacgagccgggacagaactcgcccccgcccgccgcagccaactcggccttcggcttcacctcggtctcagcccatgcgaggaggtcggcgacgctggtttcccaagtgtcaacgttgccccgccggggctggtagatcgtcaccgcaacatcggtgatgtcatacaagtccccgaaagcgtggacggctccgagcgcgtacaacatgagctgcgggttgtgtgcggcctcgacgaggatgccctgcccgtacttgagatcgatgatctgcagcttgggttcggcgatgatcacgcagtcgccggtaccgaaaccgcccggcacgacgtgggagaagtcgaggcgctgctcgatcagcacctgcggatcaccacaggcctcccgtgccagtgagatgtgttcctggacgaaggcgacgtagtcgtcggtcaggtcctccatctcggtatcgatccagccggactcgggcttgaaagtcggcgcgtcgttcagggcacgccggagcttccactccgccagggcgtgtgcgacggtgccctgctcggccgccgccgacgtcgagtccggctcacgggattccagcaccgcgctgggtgggcagttcagccaccggtgcgcgcccgacgccgagagcagcgcatgctggtcaggcatcggacagctccttcgccttggccagcagccacccgtacttcgtcgggtcaaccgccgacagcttgtccgcgccggtggcgacgatcagctcacgcacctgctcggtcatgccttggctggagagcccggcgagcactccacgcacctgcgccagcgacaccggctccggctcaggtgccggttcgggtgcctgtcggtgggcggcctcgtactcagcggcggcctgctccaggtcgggttgtgcgagcccggcggcggcgatcggacgagcgccgggcatcccggcgtgatcctcgaacccctcccacgcggtctcctcaattgcggcggcgagcatggtgacacctgccgcgtcggccagcgccatcaggtcgtcgtcggtgtcggcgacacgcacctcgacggtggaggcttcggagccgggcaggagcacggccatgcggtgctggggtcggctggtgccgaagatcgcgcgcagcatccgcctgctggggcggatttcttttgcagcgagtgcggcagccgggctgggatgcttggcgatcttgatcttgagcttggtgggcatccgggtttccttccatgtgagtggtggtacgccccatcaccgggctggtgaagggagtgccttgcatctgtcaggcatgggacgcaccgaaaccggacggcctacgactcggtgagtgttttgcgcagttgggccagaccgcgcgagacggctttccgcaccgcatcggcactggtcggctggcctgcgccggtcttgtcggcggcgatctcggtgaaccggtcgccgtggagcacatgcagctcgatgtactcgcgctgcgtcgcagtcagcggactcagcagttcgaccaccgcgaggttggcctcgacctgctcggtgaagtccggatcgtccgaggcgaagtaatccgcgcccagcccgccacgctcgtcgtcatcaccgtggccgggttggtcgacggagatgtcggagcggcggcgattgtccagctcgcggtactcggcgtacacgtcgtcgaggtaggcgcgagcccacttcggacgcgaagccgggtcgcgcagctgggcacgcagttcttcgctgtcgggcaggtcagggacgggtaggtcgatggtgttgcccctgggggtcaggtacgggacagtgaattgtctgttgaatgccacgtgagggcttcccttcttgcgaagggagaccccgttgagggcaaccgacgagagaccgtggtgttgagcggaaacagtgacgggcaccaacccgacccgggggtgaacccgggtacaggtggtgcccgtcaagcgctcaacggaggtctcccgaatacggttgaaaaacgcatgcgggtgtaggaggaaggcggccggccggtgaccggtacggctttgaccgccacagcggttgggctgtcctgccggatgacgtctggccagcaggacagccgtgagggctacttgcccttacgcggcttggcctgagccagcgccgaggctgcgaccgacttcgtcttggccgaggtgcgaccgtcgcgcagcagtgcggacgccttcttggcgaccggtcgagacgtctgcttcgtgtttcgtgtatccatgtccctgttcacctcctgcctcagctcgctccgacacggttacgcgttcatgaagatgaacgcgacaagagtgaagcggccttgtaagatcgaaggaacacaggttcgctgttcgcccttgtggttctaggttccccgatgacggttttctgatcggctgggaagcgatgggcagcgatgggtcgcgatggagaggcggtgcggtggattacaagtcgagcttccacgccgtcttggcgacggtgcgcccgctgatgaaaggcacccgtaaccttggcgagttcaccgcaggtctcatcgacatgggactcgtgcctcgcggaaccgtctacggcgagaagaccgcgcttgagatgcgcaagtcggcgacgtggaaggggtacgccaacgggtctgaccagctgcctactgtgttagcgagcgagctggctgggcgatgggatcagtttcggttcgccagcaacgtctcccaggcatacgaggagtcggcactcaatgacctagccgaccggctccacgaccttgacgagtcgatcaacaagggcaatgtcaccgaaggtctaggccagctgttctacaaggtgttcaccgaagctgccggtgagaccgctgccgtaacggagcccttgactttggcagacaaggccgaccgatctggcatcccgtacattgacgagaagacgaatcgcctcaggcttggcgaccgctcggtcgcgttaccgccgaagcatcccacaccggacacagttcagcctgctgagctggggtatgtttcggcgctcctggccgcgcattgcgaagacaaagcccgtaccggcgttgaggtgcagctggacgacatcccgtcgcgtctggttcaacacttccaagaacagcgcaaagcgttctaccgtgccgaatgggtacgagaaacatcgtggaactgcatccacgatgggcggccattgtttgacgagttcttggaaacgatgcacgcgggagtctccgacaccaacttgcatcagtaccccaacggactcgaacgcctcctcgcgacactggctcaagcagccgcagtccaactcgacggtgtccggctcgaccagatcattgacctgatcgacgtgtggagccggaaaggttcctgccacgaactcgtcgcccggaaccggctgggatgggtagattgatgcgcgccacgtccctagacacaagtttcgaagctgaactgcgcgggctcatcttgctgttcctgctcggagatgcagcggatgccgactacctgggtgccctagacaccatcaccgtcaacgcccacaccttcggggtcggggcagagaacctcaacggcacccaccgactggccagcggggaactccacacgcgcacagtcctgatgacccaagctctccagcatttggcgatccaaggattcgtgacactacagccagatcgttctccggcggccttcacgattaccgctgagggtgaatcagtcgtcaaccatttccgctcccgatacgccggtcagttgttcgacaccgcgttggagacgatcgagcgggttggcgacctgagcacgagcgagctggctcagatcatcaggtcagcgaccccggaaggagaaacgcgatgacaccaggcttctggatcagcagcatcaccgtggccgggcaccccactcggcgggactccagcgtcggtttcgaatctggactcaacgtcatctacggaccgtctaactccggcaagtcctgggtgcttcagtgcatcgactacgtgttcgggctgaaagccgacgagttcgtcctcgacgaaaactccggctacaccgaggtgcgtatgggggtgcgcaccgcgcagggctcactcacgttatcgcgccccatcggtgagggagccaataacatcgaggtctccagcacagacccacgaattgagtctggaacctacaaacgtcaatcgtctggccgttccccgctactcagctcggtgtggctcaaactcatcggctacgacgcccctgaaaacctgaaaatcatcaagaatcaaaaccttgaaacccaggcgttgacgtggcgcaccttctggcatgcgctgtacgcggatgaagaccggatcagcaccaagaaaccaatccttctccctcttcagaccaccgcacagcccgcgttcaaatgcgccctagcgtcactgatcaccggcaaggactatgccgcctacgctcgtgatgagtctgtcgaaacgaggaaattgcgtaacaacgcgatcatcgactacctcgagccgctacccaaacagcttgaagaacgaatcgagttgatcgacaaagcactcggtagcagcgacccagcagagatccagcagcgcatcgatgagctgatcgcagaactggaacgtgtccagcaacgcatcacacacgccaccgtgcaggggcaagacgtcatcgcacgcctccaacaggtgcgtgactcgctggcggaatcccgcagtctgcggaaccgatacgaggaacttgccgcctcctaccgtgcccgcatcgagcggttcgatttcgtcgaggaaggccacgccctcaccgcacacagggaaccggcaacaacctgccccgtatgcacgcaggcactaccaccggaagcgcgatccgcagttccagagcccgatctgcgtgaacgccacgacctagctgcccgactcaacgatcttcgtcaaacgatccatcagatggatcttgaacaggcaccactgcaagaacaagagcaggatctcgccgcagaagccgagcgcatcgcccggcgcatcagcggcgagttagagccgcaactgcaagccctctcgacttcgcttgccagccacaacgcgatcatcgccatgcaggcagaaagagaacagcacctcgaacgcaaacaagccatcgaagacgaacttgaagaacgcaagaatcgcacattccccaagggcaacttcaatccgctcgacgaatacccgaaaacgttctggccgcagatgggcaccaacctgctcgacatccttggagcctgcgcgttccccagactcaaagatgcccgattctcgcgtgaactgttcgatgctgtcatcaacggcaaaaccaaagcggaggaagggcagggctaccggtcgttcgtcaacaccgctgtcatgctcgccctccgggaatacctcgcctccgaggacgccacacacaaccccggcctgctcatcatcgacaccccactactggggctcgacgatccacagctcgaccccgagcttcaagaagcccgtgaaaccatccccgctgccctctacgactacctcgccctcgaacaagacggcggtcagatgatcatcgctgacaacaccaagttcatgcccgacatagaaccactaaaggaccgatgcaaactcatcgtattcacgaaacgcgaaggagaaggacgctacggcttcctgctcgatgcccaggacgaagacctgatcgatctggaggaaacagatgacaactaaccgcgccttcagctacaagcccctctggaaactcctcatcgaccgcgacatgaacaaaatccaacttcaagaacgtgcaggcatcagtccagccaccctgtccaaactcggacgcggcggcaacgtcaccaccgacgtccttgcccgcatctgcgaagcactcgactgtgacatcgccgacatctgcgaggtcgtccccaccgacctgaagggagagaccgactagatgaccgctcaacgcctgcagctcacctggtacaacaaggacaaggctctcatccccactgagaccggcaagtacggctacacgtgggttgacccctctgatccgcgctactgcgaaacccacaccctcgtgctggacgactatgtgcaaggcagccagacaccgaagtctgacgagttcgcctactccgagcgcgctgacctggagccccaggatgacaacctgctgatcttgggtgaatcgggcgatgtcctcgaagccctcacccgcgtgcccgagcttgccgagaagtacgtcggcaaggtgaaactgatctacatcgatccgccgtttaacaccgcgcagacattcgcttcgtacgaggacaacctagagcactccatctggctgaccatgatgcgcgaccgactgcaccacatgaagaagctgcttgccgacgacggctccatctgggttcaccttgactacgcggagaaccaccgtatgcgactgctgctggatgaggtcttcggttgctcaaacttcattgccgagttcgtgtggcagaaagcagactcgccgcgaggtgacgctcaacgtgtttcggtggatcaagatgtgatcctttgctatgccgcgagtggaagcacagtcatgaatcgtatggaaaggactgccgcagataacgcccgcttcagtaatcctgacggcgactctaaaggtgtttggttcagtgataaccgctccgcgcccacaaacgttatgtcttggcagcaccctagcacctttgcaattcagcacccaatcagtggcgagatgatctacccggccaagggtggatgctggcgttttggtagagaacgtctccttgagtcattgaacgagtacgcggagtatgcaagcggtgatgtagacattgcggctcgggttgcaaacacatcgcttcggtcagatcaggttcgttcagacattcctgacctggtattggtcgaccccgcttcagcggctcaatgtgctcgcacaagaattgatgatggaaattggccagaattcttcgtgactgcaaccagcttcggcagaaagtcctatcctcctaatgaaggtcagcctgcccgttcatggtggcctaatgatcaggtgggacacaatcgcgaagctaagtcagaaataaaggctctcttttccggtgcgacgcctttctctacccccaagcctgaacgtctcctcgaacgcatcattcatatcgggtcgaacccgggcgacattgtgctggatgtgttcgctgggtcggggacgacggcagccgtcgcgcagaagatggggcggcgttgggtgacgtgcgaattgctggagtcgacgttcacaacgtttacgcgtccccgtctggagaaggtgctcaacgatcaagacccgggcgggatcactcggactaagggcgaacgagtcgacgctacggaagacgggctgcctgatggtgtctcgccggaggacgccgcgaaattcacgagcgtgctcaacaagctgatcaaggacgacccgaaattgaagaaaagcatcgaggtgaagacactgaaggctgcctcgaagaccagacgcacgaaggaagtagtgaactggcgtggtggcggcggcttccaggtcgcccatctgtcgcctgcgtgtttcgactacgcccctgaactggaccgggtgatgctaactgcggccgcgaccggacagactctgatcgagtcggtgactgccaacctcgggttcacactgttgcacccggatgatgactatatttttgatgcccgccgtggcaatgccttgttgaaggtggtggagggtgtggccacgaccgagatcgttgactggcttgcttcccaaatccagcccggcgagacaatcgtgctggccgccaccacggtgatggacggcgtgcgccagcatctgcgcaaactggtgaaggggtcgcgggtggtcgcattgcccgatgatgtgtttcggtacagcgaaggtggtgaccagtgatggcgaacaggctcaacatcagttttgactccgacatgctggagtcgatcagtgccgagttcgacctgcgtgctccgaacaaggaagcactgcgccagctggtcttcactctcgacggtgactatgacccgaccgtgatgcaggtgctcaacctcgctacgggcgtgggcaagacctacttgatggcggcgtttgtggagtatctgcgccgccaaggtgttggcaacgtggtgattgtgacgcctggtaagacggtgcaggccaagacggtgcagaacttcacgcctggttcgtcgcgctacattactggttcggcgcttccgccggaggtggtgactccgcaggattattcggcgtggatcgcgcgtcaaaacggcccggtgcaactcgcgttcgggcgagagactccgatgttggcattcattttcaatattcagcagttgattgcccctaagtctgatgagggtgacactttgggtggtacgcaggatgcgatgcggcgtaagcctcgccgtttcgatgagaacgccggggtgcttttcgattatttgaagggtcttgatgatctggtcgtgatcgctgacgagtcccacctgtacgggtcgagtgcggtggcgttcaatgcggctttaagagaactggatccggcggcggcgattgggcttactgcttcggtggataagaaaaccgatcacgtgatctatgagtatccgctgtatcgggcgatccaggacaaatacgtcaaagccccggtgttggctttccgtaagagtgggtatggcacggacgaggcctctgaggaacagcagttgcgggatgctttgcagctgcgggcgatcaaacaagcccactatgatgcttatgccgccagtgaaaaccgtgctcacgttaacgccgtggtgttcgtcgtgtgttcggacgtggaacacgctacccaagtagcggagcttttgcgtaccccggaatatctcgggcgtgacgaggcagtgttgcaggtggactccaaacatgaggacgagctgacgcagcgccgcttgaacgagctggacctgcccggctcgcccgtgttggcggtggtgagcgtgaacaagctcaaggaaggctgggatgtcaagaacatcgcggtcgtcgtgacgttgcgggcgatggcttctgaggtgctcactcagcagacgatggggcgcgggctgcggctgccgttcggccggtatacgggtgtgtggcagatcgaccagctcgacatcatcgcccaccaatccttcaccgagctgctcaacgccgagaacgtgctgcagcagttcggcctggacgaagccatcgccgagcccgacaaagccaaggtagaagaggcgatccgtaaagccgccgaagagtccggcacgggtacaggtacgcccacgaccggcggtgaccaaccaacgacgacaaccggttctgaaccgggcaccggtgtcagtggtgaggtcgccggtggtgtggctccgcagccgggcaccgttcccgtcggcggcagtgattccccgggtgcgggtttgcccggtatcggggttcgcaccatcaccgaacaggaggatcagcccacctgggagttggtttcgatcggacggaacccgagctttgctgacgtgtcctaccgattcccggtgacgacgatgactgtgcagcagccgcccattgacctgtcagaaatcagtgacgccgagattgagcaagcggcgcgtcgggtcacctctgctggggacgtgctgctgcgcaaagagatcatcgccgccctaggcaagaaactccgggcagaggatcgagaaagcgccgaagtcgactccgtccacgtcgacgacgacgacgccgaggaggcgctggtcaaactagtgatcaacatgtcgctggtgcccaaaaccgaacagaccgcccgctacgtcgccacgttcctggtgccgaagttcatgcgcaccgtgacgttcaccggctggaccgtcaaatccctcgactccgcccgcgccgaactcctagcgctgatcaagaactacacaaccgagacactgcgagccacccgcgaggtgccgaccatacaccccaagtcgatgccaggcaccggctacacgctcccgttgggtgagaaggtgcatgaccagatcgagagtcgtgaccagttcgtgcgaggccgggtctacggcggctggttcaagtcgctattcgccgaggagtccttcgactccttcaccggcgaataccagcttgctcgcctgctcaacacgtcgccggggatcgtgtggtggcatcgcctgcatccgcaagaccaggcattcgtgtactacaacgcgaaagaccgctacttccccgacttcgtagccttggacaccaacggggtgcattggatcatcgaaggcaaggacgagcgcggccgcgatgacgccagggtgcaggccaagcgtaaggctgccgaggcgttggtgcgccggttggtggctgaggatgcctacgccggtcagcactggggctatctgatcgcctacgagcaagacaccgcccgtgccgactcgtgggaagacctgaaagccttcgccagcccggtcagcaacgccctgtagctgcgagttcgcctgggcgcatcacggggctccagcgttgcgggaggtcgagggtgacggcctcgccggtgatgaacacgaatccgagcctgccatcggtgagcatgcagccgccctccagcatggcaaggaagtccgggatgtggagcgcaagctgggtcggcgattcggtcaggagcttgtcgatcgccgtgtggagcgtcgatgggcgtcgccgcgcacccgttgactgcaggctgtccacggcctggtcaaccgccgtgctgttgcgcccagcgagcacctgcaacgcctcggccatcttcaccagcagcacctcctggtagaggtggctggtggtgcaggtgccgcgcttgacgtagttcgtggggcactcccacacgtcgacccggttcggggtaccggagtgccaggtcttgtggccgaacggccgtccgcagtcgccgcagacgatcttgcgggacaggcgcttgccgaaggacttgtagccgcgtgggtcgacgcgggtgcccagccacggcaactcgcggtctgcaatgccgagagcctcggcggcgtggcgttgggcgtggaatgcgtccatccactcgacggtgtacccggcggcgagattttcgaggaggaagctggtcagccggtaggtcagtcgggcttgtactgttgcgagttcggggtattgcatggtgggggctcctgtctttgcgtcacgtacatacacgctctgatcagggctaatagcaagtcgtaaacggcgataccttttagcgcttgccgaactatttggcgctccgttgtcagcctcgacgcacgtggttcacgccgccccacagcgcctctcggacaagccagccaccggagccgatccgtccgaatatgcggctcgacggtcaacactaaggcgcgttttacctagtggggagcgggtttcgccccatctgcgtcatccgcgcaccacaaacccctgtatccacttcgatacagtctgc

SEQ ID NO: 69 - DNA, 27846 bp, Propionibacterium acnes
ggtggtgccgaagaagaaggaatggccccaccaatctgctggtcggtagaagtacggggtttgagccagtcgagtagtttcataatctgctccttgcaaggtattgtgaaggatatgaaatctcttacccctcatttgcttctctgctcttttttcacaagcattgctcctgccttaggagaaggatttcgcaacaaacgtgtggctttcattccgacagcagcagcccacgaggagtacacagcctacgtggattcagcacgctcatcatggaaagaacttggcagcaatatcaccgatgtggatattgccagaatgcctctaagaacagcgaccgaggcgcttgagcaagccgagataatctatctttcaggagggaactccttctacctcctcgattgcctacgctcaacagaaatcgaccagattattcgagggcgtctggccgaaggggcgattctagttggtgaatcagctggagctatagtttgtagcccaaatatcgcctacattcagccaatggatcgtgtccctgacaactacagccaggctgactacaccggactgaacttagtggacttcttcccggtacctcactacctcgcccctccatttgtgaagagttccaaggaagtagtcgcccagcacgctagcctcccactcgagctcatgaacaacgcagaagcggtaatagtagagggtccccaaaggacaaagatctcatcagagcaccagtagtcctcgtgagtcgtacaccgacgtgcccgtgtggctgccaccgcctcggatagcgcggtcgagggccatgatggtggcgaccacctcgtcgatcttctcggtggacttttgcttgtcgggtttgatgtttcctgccgggtcggtgcggacgtgaatgttgtcgaccatccaggacagcactgggtgcctgccgtgagcgagcctaccttctagtgcgagtctcatgagctccttggacggtgggctcatgtctttgaagccttgcccgaagggcacgacggtgaacccggcatcgtcaaggttttggctcatctggactgcgccccacctgtcgaaggcgatctcgcggatatcgaagcgtgtcccgagttgctcgatgtggcgttcgacgtgggcgtattggacgacgttgccctccgtggtctctaataagccctgttggtgccacaggtcgtagggcacatgataacgcgccacccgcaacgccaggttgtcctccggtatccagaaccacggggcgatccggtacttcttcgtccccgtagggtgggaagatgaggacgaaggcggtaatatccgtcgtagaggcaagatccagcccgccgtagcagcgtcttccttccagctcgtccaggtttaccgggtcggctcccgcgtcccagatgtgcatgggcatccaccgcaccgactgcttgacccactggttcaacctgagctgccggaacgtgttctcctcggcagggttctgccgggccgagttgcacgccgcgcgcaccttgtcgatcggcaccgtcacgcccagtgaggggttggctttgcgccacacggcctcatcggtccaatcatcatccgcgtcggccccgtagatcaccggatagaacgtcggatcatacttcttgcccgcgaggatgtcctggactttctggtgctgctcatagcaaatcgaatgcgtatcagttccggcggtggtgatcaggaaatacagcggctaggtgcgtgcgtcgcccgaacccttggtcatgacgtcgaacagggctcggttgggttgggtgtgaagctcgtcgaagaccacgccggagatgtcgaacccgtgcttgaagtaggcctctgcggagaggacttggtagaaggagttggtgggcttgtagatgattcgcttctgcgaagagaggatcttcacccgcttcgacagggctggtgattggcgcaccatatcggcggcgacttcgaacacgatcgaggcctgccgccggtcggccgcacacccgtagacttcggcacgctcctcaccatccccacacgtcagcagcagggcgacggcggcggcaagctctgatttgccctgcttcttggggatctcgacataggcggtagtgaactggcggtagccgtcggctttgacggtgccgaacaggtcacggatgatttgttcctgccagtcgatgagctggaagggctgtcctgaccagcggcccttggtgtgtttcaaggcttggatgaacgcgaccgcgaagtcggctttccgcttgtcataggtggagcctgcggccatgaaccgggtcggcgtgtaggtgtcgagagtgcgcatcacgcccgtcaggctccttcctgtgctggttagttggtgtgggcgaaggcccaggcgatggcgtggccggcgtcagcgaacagttcgtcagcctcggcgaccaggtcgagttcgcattcactgaagcctcgggcgtccggtccccagccggagatcggctgctcggcgagcttgtagacgcgggcgtcgtttccgatccggcctttgcccaagtgccggtaggccgaggcgaggacgaagtccccgtaggcgatcaccgtgccgtagctgtcggtcgccatctgcagctgctccatcgtggtcttttcgttgttcatgaccttctccttcttgccttgttcggtcatgtacatacagccataggtgcgcgctcttatccagtcgtaaaagccctagtcagcccactatttttgaggaatctttgaggggcgacgggcacggaaacggcccctgattgggtgggtacccacggtggcttggggtcagtcgatggccaggtgccaggcggggatcatgcggcgttccccggtgatcgggtctgggtagcggtcgttgacttgggtcatgcctcgcagggttgcccctgcctgggtgaggttccagatgatcgtggtcaggccggtctggttcgcgctgatcgtgaactcgccgatgctgtgctccttgagttcgtcgaggatgctgggcacgtctgagtcgtagagaccttcggcgaagtcgagcagctcgttgcccgcccgctggctgttcatgtagacggtgagcaggctcgtggacgaggtttgggtgcgggtcgcgatcttgctggtcgaggtcgtcaattgtgttcatcgcgggtgtccttgtgggtgggtggggtgcgccaggcggcgttgccgtccaagtgtttgagcaaggtgcggcggacgggtttggtgtcgtcgccgatcagaccgaggcgcagcagccagcagcgcatcgcatatttgtcgttcccgcccgtttcggcaggtttggctgaggctcttgtggcggttttggcgtggtcgatgatccgggcgatcagcaccgtggtggcctccactacctgcgggtcgggcgctacgtcgaaccaggggaactcgaccgtcccggcctcggcgtcgatgctcatcggggttgcggggatctggagtgctttggcgatgagctctcctttcgctgctagcgtcgcctccaccttccctttcgtggtgtcctcccaaccggtggtggggaacgccaacgtcaaccccaactcgcctggctcgtcggtggtgtccgtcgggaatccggcctgcgcggccgcctcgaccagcccggccacgtcggtgtcgtcgggcagatgcagcagccagtcacgatccaacatggcctcgccaatctggtaggcaaacgttggggttcccagatactcgacggtcgctcgcagctgggtggcgagaaaagcggcgagttgcttgcggcctttgcgctgcttggtgaacttgagtgtcgtcatgaccggcctcctttgcgtgttcccctggtcggagtggttttcggtcatgtacatacacgctctatcccgaccagatagcaagtccggacggccacctatttcttgcctcgatccacggccttcaccacatccaggtaggccaactgttggccgtcgcgcaggcaggtgatacctgcggcgtccccggtggcgtcggcgtagcggcgcagaatgactgaggcgtatttctcgtcgagctccatgcagtaagcgatccggttggtggcctcacacgccatgagcgtggagccagagccggcgaacgtgtcgagcacgatcgcattcgcctgggtggagtttccaatcggatacgccaacagatccagcggcttcgaggtcggatgatcagcattcctgcgaggcttatcaaaccgccagacggtggtttgtttccgatccgcgtaccacgtgtgcttgcccgtcttcacccagccgtagagaacgggctcgtgttgccactgatacggggaacgacccagcaccagggagtccttgacccagatgcaacaccccgacagcttgaagcccgcgtcttgaaaggcgcgccggaagttcagaccttcggtatcggcgtggaacacgtacgcggacgcgcccttctcacacacgcccgccatctgagtgaacgctgcgagcaggaactcgtagaacgcgtccgcgctcatcttgtcgttcttgatcgacaagccgtcagacgattcgaaggcgacgttgtatggcgggtccgtgagcaccaagttggccttcttgccatccatcaacagctcgatgtcgcccgcgttggtggcgtcgccgcacaccagccgatgcctacccaccgtccagatatcaccccgctcgacgaacgcggcagcctccagggcggcggtcagatcgaagtcgtcatcctccacctcgtcctcatccaaggagccgatgagctgggcaatctcatcgtcgtcgaacccagtcagctcagcgtcgaaatcactcgcgtccaggtcggcgatgagcagggcgagcttgtcctggtcccagtcgccactgatcttgttgagcgcgacgttcaaggctttttcgcgggtctcgtccaactcgacgaccacgcagtcgacagtggtttcaccgaggtcttcgaggactttgaggcgctggtggccgccgacgacatggccggtggtcttgttccagatgacaggttcgacgtatccgaactccgtcagcgaccgcttgagcttttcgtagtcggggtcgccgggccggaggtctttgcgcgggttgtagtcggctggcgtgaggtcagcgatgggtagctgctcgatgcgcacggggctccaccgccttccgcaggtcgcgctcaaaacgccaggtttgttcccagcgcggccaatcccggcccatgtgcccgtagaccgcgagatcccggtaacggggtgtgcgcaggttgaggacgtcgatgatccccgccggccgcagcacgaacacgtcacgtgcggcggcggtcaagatgtggtcggcgtactcgccggtgccgagcgtgtccacctcgaacgcgaccggatcagccttcccaatcgcatacgagatgcccacctcgcactcagcggccagcccggcgtcaacgatcgtacgagcgatcaggcgagccatgtaggccgctgaccggtcgaccttggatgggtccttgccggagaacgcgcccccaccatgagacccgagcccgccgtaggtgtcgaccatgagcttccggcccgtcagcccggtatcggctcgcggcccgccctcaacgaaccgacccgacggattcacaagaatttcggtgtgctcgtctatgggtaggtaggtctggcaggccggggccacaatcagcgagcgcacctcacgctccaacacggccagatccttgcccgcctcatgctgcaccgagaccacgacggtctcgacggcggcgggggtaccggtgtcgtcataacgcacactcacctgggccttgccgtccgacttgatcccgcagatcgtcccctcgacctgggcagtatcgagacgctcgcagatgcgatgtgccaggacgagcgggagcgggaggcgttcaggggtctcggcggtggcgtaaccgtagaccgtgccctgatcgccagccccctgcaacgcgaacgccgaactatcaccaccgcgtgcctccagcgaggtggtgaccccggcgttgatgtcgctcgattggcggcgcgtccacacgtagatcaggatcccgagcggactgtatccggcacgcgcgagggcggtgcgcacagactcccggatacgcgggcggtggttggtggtgatttcgccggtgacgatgatccgccgaccggctgccatcacctccaccgccacccgtgcggccttgtcgtcgtagaggatgtcgtcgaggatctggtcggcgatctgatcggccaacttgtccggatgaccagcacacacagactcggcagtacgaatcgaacacataagcacactcgcttccacgaatcggaggggaacaagaaagcgtccaccccactagagggtggacgcgaagatcatgaggggcggttaggagcgggcgttgagcagctgctccatcacctcgtcgccgggcgtggtgcccgcgtagtcggtggtgcaggtggcgcgcacgatctcgtaaatctcgtaccaatacacattcgcctgcttcccgaaactctgggacatggcgacaaacgggctggcgatggcggcaccggtggtggggtgcttgccgagcaggccgaacttggagatcgcctgctcgcactgcacataccgggcaaacgcctgcgcatacgcctcaatcaggcgaggcgccacgaattgggaaccgccacgttgatcgagccactgccacgtctcccgatagacgaggtcagcgccaagcggtttgccgtcacgctgaatctccgacagatagtccgatggttcgggcatcgtctccccggcaagcaccgcaccgtcgccaatgtcattacctgcgaagtcgaagggttcgttgagcgggtcttccaggcgggtggcggggcgtccggcggcgagtttctcgcccagcgggccgggcttcgcgcctgcacgcacgcggcgtcggcccctgttggtgccgtctttggccatgggtcgcctccccgccgtagaatcgtcatggtttcggtgctgaagtccacgggaggtgtgagtggttgagtctttaaaactattcgttcggacctacgtgtattgggtagggctcatccttggcttcgcgatagtgcccggttctctgctcttcactgctgaagtcgccccggtgaacactccattgtggcttgcacctttcgccgggctgctgctttttgtcattgatcggccatcaacatgggagccgccgctctggcgagcattactgatccgagtattgggtgcaggatttgcagccaccatgctcatcgcgtttgatgcagttgcttccacccactatggatctcaacactggagtgagacgctcctatctttcggtctcggttggattgtcttcacggtagtggcaggacacatgctcatgagcagctccgcccgatttggcacacctgctcacacgatcagggacgcgatccgtacctacacgacatggataggaatctgcttcgggattttctatatccccgccgcgggactctccgcagctggcactcttttgatggttcttccgctttatggaacgttcctcgccggcctggttcttttgatagttgacccgccacgacgatggccgcaaccgcgagtgaaggcactgtggatacgactcttgtcaagcgtggcagcagcattactacttgttgtcacgaactcgttctatcgcagtactcgcacacacgagattttcgtcggggactggcaggaaaacctggtcttcttcgtgggtgcttgggcactttatgccgcagtggctggggccaggtatcttacgcctggccccagccacgaagcagatgacaaactcagtagatgaattcagctagagcttgacatgctgccctcttggtttcttcgctaggctcaacgcccgagtagccgtatgccccattggaaccgtctgtgagaaggccaacgtatctgtcatccaatgggccatcaatttctgcaaagaacttgtcctttgcggttcctccgtcgcttgcaccaacactctcagagatcgccttgaatcgctgcaatagcgaaactggattgttgtagtagctcctcagcgttcgggacagaaggttggggtcgtcggctcccgagcctttcagcatcgcagccagtttgatcgcatccccgtcgctacacaggtcggagtagttgcagttgttcggcagatcattggggatggtcaaaccttgaagtccgctgtgattcttatagttatccccttggccaacaagagcccttgctattgcaataatgtttgagccgggattcaggtcaacaaccttttgaatcggaccgagcgctgaagctaagtcacccgcccatcccgtccacttatcaggaacgagcgggttgaggttgatgtagcccagggtggtcacgctcatatgcgggatatctactgcaccacctgcggggtccgtccattcttgtcgatcggagcgaatccacttattcaaggcagagattatctgagacgcttgagtgtcatcttccagccttttcgcgtccgcctcccgatatgcttcagctgccgcggaccactttgcgcttcccttgaggtagaccgttgataggtagttgaggacacatcgccaagtcggaactttgacccaagtaacgtagctgccggatgtgatcggatcctctccgaaagcgtagtccttatagaccacgcgcaattcctcgaaccggctctcaagcgcttcgatcagatcgagaaaatctagagcgtcgtaattcactggctgcgcgtggcgcaccgacgaatcggctgacatgcgacccgaatatgccacgcggtcaagatcccatttcccccgatatccactgatttcgtggaactgatcaaatacccagttgtcggggatggggaaaccgagattacctgagaatccggtagacatgtcagaaacgaatgatgctaccgcgtatccagcctgagctatccgggtgcagatgtttcgcgaggcgtagatacccactcggtagccgccgccgaggctttgcgttactgccttgaagtagggcaggatgtggctggtcacctgaggatccgtggcatcgtagtcaacggcgaagtagatcactgtaggtggaacaccaagtcgttgggcagcggtttgggcctctttcgcatgacggtgcccattttcgacactaaagtacttaagttcagttgagtactcttgaaaaattgggaaatacttcagcccatgaccaacgattcgctctagctcgcctgtgcggagcgccttgaaatagtctgcctcagacttactgctttggttgggttcactgagatagcggcctacgatctgataaccatcagccttaagatgtccagcaagctcgtcagtgatctcaaagcgcgtatcgcaagccacacatggccgattggggtcgcctttagaagtgagcaggctcatccatgtggttgggtcgaccaccccggtcactggcaaggcgtgtgcttgctggaactgccacagcgtgttgctgatttcgctgttccacgtgctggtcggcaaaatggagtagccgttgcagaccagactcacagtggctagccatacccactggttagtgccgctactaattgtccgtagtttggagcgagtgcctgcaccaaaattcccggtggcttcggcagttgtgtatccttcgattgcttggaggacctggattaaagccgtgttcatttcacgcccgtacaagccatcagtgggaatgatccctgtgtagttcttgtacccacggttaatcgcttgctgtgcctgacgaatagctgtcttgccgccgtaggcagagagtaaccggaactgtttcattgacagaagcgccatcattagttcaacatcgaccgttgcgctcgtatcgccaaggccaatatcgactttcatctggcgaatagagtcggccacgtggtcggtaaactcaagagtgatgccaccgtattcggctcgatatcccttgcaccacaaggctccttgaataatcccatgaacattgtcgtagccagaagtttgagtaatgccgtttggccaacgagacttgaatcgagactgtgttccagaaccgaaattgtttgccgtcgctgtaatacccagttcgatttgcagagcgcggatgagtgcgttgattgtatcccagccagtgttaccggtttcttggactgagccgaacccagttttattgccgtaagtcgaattcagccactgctgagttttcagcaccatttgatctgccatgattcctccttcagaaatcagttgttaactcgaggcaggcgaacacctgccacggaggggtccagaacaccggatgagaagctccgagttttttgccctcgcctgtacgtcaccgggaaacccgaatccggacggcaagagcgaaacttcgcgagtttcatccctcactggtactgccgacgaagcccgaagtgttaataccctgtttgattctgggactttgcgcgcggttggccccgcccgctgacctgtccgagcgtcgtagagatcgagaggccccaaccccctcgccagcgccgccaggttcccccgtgtctgccgatcagcaccgaggtgggcatctttgaggtttcgcaacctcggcgcgacgtggcgcgacgtggcgcagatttcagtaggtgtagatcctcggggtctgcctccaccggtcgccgtcgagcgccgactggcgggagtggcacggcttacacaaactgcggaggttggcctggtcatgggtgccgccgtgctccaacgggatgacgtggtggacttcctgcgccggggtgtaccggccagccgcgaggcagtcctcgcacaaggggtgggcggtgatgtaggcggtacgaatcttgcgccagcgggccccataacgtcggttgatcttcgggtcacgctgccacttgcggtagcgctcgtcctccgccttggcgtgggcttcgcagaagcgggcgtgggtgaggttcgggcagccgggctgggaacacggacgggcaggcttgaccggcatcacgcacccctttcccggacacggcaaagccccaaggcacccagccgatgaccgggcttgccctggggcttttcctacttttcaaccacctacatcattgcaggcccgaaaccctaaatgcatccgcagttcttgacaccttttggcggctaggttcacgcggcctgcccatacagcgccgacgccagccgggcgagcgcccgagacttcttctggtaggcgctggtgcgctccacgtagaagtggtcacacaccgtttgcaccgcctcatcctgggtaccgtcgccgaggaagaatgcttcgagcacgaacctgtcgtcgtcggtgagcagctgccaggcgggcaggaaccacgccatgtactcacgcgcctgggcgtaacgggcacggtagatgtcgatccgatccaacgtggccgccacccgcatctccccagcatgcagatccgtgtggcggggcatcccgtcgagtttcgatgaggctggggtggtgacgtcgtcgtaggcggtcttgatctgctcgtcggtggtgtcgatgatctgctccatcacggcgaagtcctgcaatgcgctgatggctgctttgcgggtgtcgaggtatttggtcatcacatgcatgacgactccttcctgcttatggttgtgagttcggtggcgaccgcgtcgatcaatgcggcctgggtcatgtccttcgcctccagcgccttgaggacggcttggtcgagggtgccggtggcggtgaggtgggtgatggtgacaggctcggcctgtccttgtcgatacagccgggcgttggtctgctgatacagctccaagctccaggtcagcgagaaccacacgagcaggtggccaccggactgcagattcagtccgtgcccagcggaagcggggtggatcaggccaagcgggatgtcgccccggttccacgcctcgatgtccgccgacgtcttcagttcgcgggcttgtgggaagcgacgctggatgcgttcgcggtcgtgtcggtaccagtaggcgacgaggacggtttggccgttggcggcctcgatgatgtcttcgagggcatcgagtttcgccccatgcacctcgaccgtatcgccgtgctcgtcgtagatcgcacccgaggcgagctgcagcagcttgcccgacagcgcggctgcgttcgccgcatccaccacctgcccatccagatcaaccaccaggtcggccttgagctgctcatacacagctcgttctccggctccgagcaccacgggcgtggtcgtcaccgtcagatcaggcagcgtgaggtggtcggtggtgcgcattgacaacgtcatgtcggcgatagcgtcgtagatttcctcctcagcgcctgccctcggcttgtacgtgaacacctgcatcccgttgcgcttatccggcaggaaccacttgtcgcggtagcgggtgatgaatctgccgaggcgttggccgccgtcgaggagccggaattgcgcccagatgtccatgagcccgttggaggcgggggtgccggtcaggccgacccagcgcttcacgtgtgggcgcattttcaccaacgccgtgaaccgcttcgcacggtggttcttgaagctggagagttcgtcgatgacgaccatgtcgaacggccagctatcgccgtactgtctgacgagccaggggatgttttcccggttgatgacggtcaccatcgccgacttggccagcgcgtcgagccggtcagctttggtgccgaccgcgaccgccaccgatagaccttggaggtggtcccacttggctacttgtgctggccaggtgtcgcgggcgacccggagtggcgcgacgacgagcacccggctgacggtgaagtagtcgagcagcagctgccagattgccgtcagggtgatgacactcttgccgagtcccatgcccaggaggatcgccgcttcgtggtggtcgaggatgaaccgcgtggcggtctgctggtagttatgcggccggtagcgcatcaagcacctccttgatgccgtccaccgagtcaacgaccagcgcggtgaagccgtgggcggccagttggctcatccggcggcgttggatcggccgaggcttcttgccgggggctttcacttcgacgaagacgacctggcctcccatcaggcatagccggtcaggtacgcccgtggttccagggcagacaagcttccagcacaagccgccggatgcctcaacggccttcttgagctgggcttcaatgtggtgttcgttcatggtcactccttgagtggtttcccacgggggtgacgactggtgacgggtggatctggacttttctaaaggagatatttttgtggccttagtaatagttcaatactgatcgtcaccggtcgtcaccctcatcgggtttagctgttgaattcgctggtcagagccagtccgtagacgtacatgccatgcttggacttgcgtcgttcaaacccggattgttcgagagtggcgttgaagtcggccatcggccgagcccacccgctggtggattgcgcccacgctcggtactcctggtacaggtcaccggcgcgttcggatagggacgggtccacctcgcagcgggcgtcgaggaattgggcgaaccagttgttctcttcccgatatgcgcttgaggcagcgaccacttgggcgggtggggcgagctggtagtcctcggcgtggatgagccgcgagccttccatgatccatgcaagtaccgctccgccggcggtctcgtagaggtggtcggcgtagttcttcacatcggagctactctcgatgaccgcgttgaacgggatcacgatgagcctgcgccagatgcccgcatccatcgcgcccaccctgggcaggtgattcgtgtagaggatgagcgtgtgggatggggtgaacgcgaacggtgccttgtatttcttctccgcgtagatctggtcggtgaaggcgagttgcttgaccgtggaggtggataggcgcacgccttcctcggactctgcggcgatgatgagctgtttgcctttcgcttcggcaagctcaggtttgacgttccggttcccgccaatggtgagcacgtcggcggacatgttgcccgcatacgtgccaagcactctcgcgatagtgttccagaacgtggacttgccgttgcggccgtccccgtaggcgatcacgagggcttcgaccatgaccgtcccgatcgctgccagcccgacgatccgctgcacatacccgatcagctcccggtcggattggaagaacacgttgagcgcccggttccagatttctgcgcccgtgtcggtggggtcgagcgcggtttgtttcgtgatcagatccagcgggttatggtcacgtcgggtgccgtcacgcacatcccacgtgccgccaggcgtgttgaggagatacgggtcagcgtccagccgggctggggtggtcagcaacatcgggtgtgcttccctcaggcaggaggtgatcgcccgggactcgcggcgtttcaacacgaacgcctcgtatgccttcgcgtcctcaaatgcccggtaggcggcccgctgcggtgaggtgaaaccgccgagtgctttcgctttcgacgatgcggctgcgagcaccgcgttcgcgcccgtcaccatgagctcgtcgcgggctttctccagcagatgcccggcctcggctagttgccggtcggtcagttcctgggcgatgccttgcgcagcaggcgcagactcagaccacacaccgccttcgtagacgagccagtccgtggcctccgtaaacgccagacgcgacgagtattctgcggtgagcatggatgcctgcccgacatcggtgaagtcctccggccgcaggctcgtcagctccgcgtaggcttccggcgacagataacccggctgcgcctcgactttggcggcgaaccggcaggcgctttgccagatcgactccaactcgtgatccgacaggggcggttcacacagggacgctttccggtcgaacaggtcacgagcttgggcggtctgcccgtaacggatcaggacgcgtccggcgaagcgggagagggtggcgttgcgggagccttccccgatcacctgcgtggaagcgtcgaacgcggcgaacacgtcgatctcgtcggcctcatccagccaggcgtcgagcagctttgtgccgttgtggatggtggtttcggggttggtggtgccgtagatgaaccgtccggcatccaacgcctgcgggtcgaagaacccgaaccgtccagcgaggcggcgcttcaaccccgcataggtgtcggcgtcggtgaccgggctgattgggaagtagacgtggaagcgaggcctggccgacagcgtccttttcggcttctggtggttacggctggtggcggtcatgaactcaacccccgccatcagctcggccaggtcatctggggtgatccactcgtcggggttgtcggtgtggtcgttgtcgatatccatcacgacacagtccgaggagatgaagctcgccgaggagcgccggtcgccggtgtaggtggcggcgacgtgatccaaccacgccacctgctccagcgaggtttggtcggtgatgtggtggtggttcgggtaatggttattgtgcgggttgccgctactcgtggcggcgcacaaggtgaacggagtcatgcgggatgcacctcctggaagtcggcgtcgaagaagcggatcgggatatccatctgatgggcccagtcgatctccgcccgcatccccgggctgaccctgccgatataggcccacagctgctcgcatttcgacagcaggatgcggttgaaaaacatcgccagctcccgggcatccgggtcggtgtcatccatgaactgcggataatgcaaatgcggagccaacgggatctgacgagcctttaccgcaaacgcacaaaaccggcgggcaagctccacgttggctgctatgtcacccgagtacggggagcagatgtagaccaatgggcggtagccgtattcggcgagctggatttctttcagcgcctggtagcaggtcgggtcggggtatccgtcggcgttgcgcagcggaatacccacatcgatggtggcggtcatcaggcgccctgaccttcacgttcgatcaccggcagcaggccacgggtgttcttcaacaggtcgtagatgaacaggcgacccttctgcgtccagtacatgtgggtgcgggtcttgccctcgtcgtactcgtgcgtcttggactgcgtgtagccctgctcggcaaatttcgcgtagaggaaccagcgtccggactggtggaactgcacctgctcctcgcgcagaatctggttaagcttcttcgccgacagcccgtagtccttggcgatctctgtggcggtgatcagtgagggcgatgccagcacgatgtcgtagtacgacaccttcggtgccgcctccaacaaagcttgctcggcggcgagccgcttggcacgttcagcccggagcgtggtgatcgcccgctccagaaactcgtcgtcagcgagcagttcgtcgatggcgtagataccatgtcggcggatcgtcggcagaacctcgtcgaacacccacgtctcgaacttctgggcggcaggaagtttggaagtgacgatcagccggtacaggtcgccttcgctgatgaacctgacctgctgaaccccacctgctgtttcaagggggtagtgattcacgactcccttgcagtgacgtgccagagcgtccttcgtgttggcgtagccgagggctgtagccacgtccttgccgcagaacaggatctgcccgctagaggtgatggttcggattgtgccgaactcgtggttggtgaacacttgtagtccggtagccatgaccagctcctattctgagagccaagtagacaatcggcggcgcggggtgcgccaggctctcacctgtcaggcacggcagacaccgaaaccggacacggcttgaggaaggctctcgcccatacgcccccgagcaccgacaaatccggacgggtcagagggcacactggtgtgtgaacgtaccgataactccgtgccccgtgctcttgcttcggcgtcatcaaccaggtagccttgtagtcaacatgaccggttccgctgcccgcctcggtgggagtccagggccggtcttcgtttttcgtatcaaacaggggtgcgcgtggagcaggtgaagcagttcaagacctacggtgaacaggtcgaattgcttcgtcagcgtgggatgcgagtgaatgatccccagcatgctgagacgctgctggcgcgattgaactactaccgcttgtccggatactggtacccgatgcgccgtttctcccaaggcgacggcactgcccgagatgaattcgttgagggagcatcgtttgacctggtggtagccctctatgggtttgacgaacaattgcgccacagcgtgttcatcgagcttgatcgcgtggagttggctattcgaaccaagctcggtcacgaactgggtcgccttgacccgctgatctatttggatcccaagcgtttgagcgcccgggcacggcagcgaaacaaagacgggcgtagcgtgcacgaggtgtggctgagaaagtaccagtcggcattgaaagcgtcgaaggaggacttcgtcgcccaccacaaatccaaatatggcgggactctacccatctgggcggctgtcgaaatcatggattgggggatgctgtcgtacctgtacggcatgtcgcccaatatcgtgcgcaaacggattgccgagccctgcggcctaactggtcctcagcttgaatcatggctgaaatccttgaatattctacgtaattacgcagctcatcatgcaaggatgttcaaccgtgtttacgacatcaaaccgaaactgaacaatggcgtcaggctggctccggtagctgaaggaatgaatcgcgtgttcgggcagctctcccttatccaatacttgcaccgccaactggacttgtctccagccgaccggctaccgaagctgttccacacctacccgcacaatcccatcgtgccgttttctcgcacaggagcacctgacaactggcgcgagttgcctctctggtgcgtctaatccttgcggtagtagtcgcattcgtacccgtcggcgtcgagtggcagtcctgctgcccagtcgggtggggtcgtcatgagctggcaggcatcggcgatggtgaagccggagtcctcgggttcgtcgatgacgatttcgtcgtggacgtgcatgacaatcttgtgcccagcctgagcgacgagtgtcatggcgtggacgaggaggtcacgagcgactgcttggacgatgttctcgacgagtttcccgccgtaggtctccagccgcccccacttgcgtccggtcgtgacaccgctgtaggtgatggaggtgccgccccaccggttctcaccaagctggggcttcacgtaggccagccgcctaccagagggcagggtgatgaacaagatgccggactcggcagtgaagcgaaggttgcgcagccgaacagcctggcgggtggtgatggcgtcaagtgcggcctgctcgacatccgcccagagtcgcacgatgttggggttggctgcccgccaggcgtcgacgatgggtttgagttcgtgctcggccagccccatccgtagggcacccatcgccttgagcgctccgacggagccgttgtaaccgcaggccagcgtggcgatcttccccttctggcgcagctcagcgttgatgccgtgtttttcgacggggacgccgaacatgcgcgacgcggtctcgcagtagaggtctttgccgtcgcggaaggctgccagggtggatgtttctccggcgagccaggcgatgacgcgagcttcaatcgcggagtagtcggcgacgatgaatcggcatccggcgctggggatgaacgctgtccggatcaactggctgagcgtgtctggcacggagtcgtagagcagttcaagggcgtcgaggttgcgttgtcgggtgagggtgcgggcttggtcgaggtcgggcaggtagttacggggcaggttttggacttggacgaggcgtccggcgaatcggccggtgcgtcccgctccatagaactggataaggccgcgtgccctaccgtccgtgcctgtgacgttatgcatcgcctggtacttcttcaccgagcttttcgcgaggtcgccgcgcagctccaggacttctttgaccttgcccgtggcggactcgagggcggcttcgacatcagccttcgccaaggacgacatctcgcagccgtgggtggtgagccattccttcaactggatcggtgagttcgggttctccaacccggtcaactcccgcgcccgcgccaacgtggcggcacgatgctggtcgtccagggcgacggcagcgtctgcgagggtgtggtcgagcaggatgccggtgtcgttgatgcgttgatccagggcgtaggcgtcccactcggcttcgggaatcggaaacgatgagagccggtcgtggatcgcgagttcgacctcgacgtcgcgctggttgtagtcgatgaactgagcccagctggtcgggtcgctgctgggcaggttacgggtgccgccaccgttgagcacgctgggtgtggctggcgtgcagaattgcttgatcagccgcttacccgccgtatccttctgaacgtcaaggtcaagagccgcaccgaccgcatccaagctcatcggcagaccgagttaagccgaccacaccatcgtgcagcgccactggctcgggtcaagaaacccggccgccaacagctcggggtaatgacgctgcagccacgcggagagcgcgacccgctcgaaggcggcgttatgcgcccacttgaccacgcccgggtccaccaatgctgcgagcacctcgtcgggcagcccaccaccactggcgagatcgacgacttccaccgggccgccgtcgatcgagtagccgaagatgaggaggcggaagtcggggtgttcggcatacgggtagacgccggttttcgctaggggtgctgggctgaaggtttcaatatcgatagcgatctggcgcatcagggctcctggacagtcgggtaggcgaaggtgagggagccaaccggtgtttggtggctccctcactgctggggtgctacttcgggtcgaggttgtaggtggcgttcatcctgtcgagctcggccttctccttggcgatcagctcatcgatgcgctgacgttcgcggcgtttggcccgcttgtccttaatccagtagtagccccagaccatccagaacgggatcaggacgtagacccacacggcgagggtgatggcgttgaaacagtcactcatgattcagcctccttagttgaggaagtcgtcggccggcgcgccgaagtcggactcagcggagacgcggcctgcgccaaggggttcaccgtcgcggatcttctgaatgttgcccagcccgcacgccacacccttgttcccgttcgtgttgaacgcgtagaacgacagggagacgcgggcgtagcaacccgagtacacctcggaacggtcaaggatcggagagacgttctcgtccacaacctgcggcggagtgaggctgttggcgttgacgaagaagctgtttgcgtaggcttcgtcgtcacgctcggtatccccgtcacgcagcggcagcttcagagccgccttgttggggcgcttgcctccgaacttggccgtaccagcgtcgatcgccgcgtcgatggccttctcgatagctgtgatggtggtggtgtcggccttcgggatgatcagcgacacggagtacttgggcttgccgccctggatggagttcggctcccacacgtgagcgtaggagaggcggacttcgccggtgacgacgcgggtggggttgttggttgacaaggttgttacctgctttctgttttcgtgaattcggtttgtgcgctgtggatttccagcgcgggtcgtttgtcggtgtcagacacgagcgtcggcttacccacgggcttgaccacgaggtcgccgagcacctcgttgaaggtcttcttgtccatgagccgttccatcgcagtgagcgtgatgagtctgcggtcgtagatgtcggcgtacccggcagcttcagccgcttcggcgacggcgttctcctccgtgtacttgcggacagaccgtccggcgacgagcttgaaaccatcccagtgcttgccctggttcaccgcctgcgagagcgcgtaggcctccacatccgcagcccacgttttgagctgtggaatccttgtcagcacgtccgcaatctcgctgccggacagctcggccggtggggcgaactcgtgctgggcgagcgcgaggttggcttcggcgcgtgctcggcacgtcggtgcgatgcggcagaactggcaccacgagccgggacagaactcgcccccgcccgccgcagccaactcggccttcggcttcacctcggtctcagcccatgcgaggaggtcggcgacgctggtttcccaagtgtcaacgttgccccgccggggctggtagatcgtcaccgcaacatcggtgatgtcatacaagtccccgaaagcgtggacggctccgagcgcgtacaacatgagctgcgggttgtgtgcggcctcgacgaggatgccctgcccgtacttgagatcgatgatctgcagcttgggttcggcgatgatcacgcagtcgccggtaccgaaaccgcccggcacgacgtgggagaagtcgaggcgctgctcgatcagcacctgcggatcaccacaggcctcccgtgccagtgagatgtgttcctggacgaaggcgacgtagtcgtcggtcaggtcctccatctcggtatcgatccagccggactcgggcttgaaagtcggcgcgtcgttcagggcacgccggagcttccactccgccagggcgtgtgcgacggtgccctgctcggccgccgccgacgtcgagtccggctcacgggattccagcaccgcgctgggtgggcagttcagccaccggtgcgcgcccgacgccgagagcagcgcatgctggtcaggcatcggacagctccttcgccttggccagcagccacccgtacttcgtcgggtcaaccgccgacagcttgtccgcgccggtggcgacgatcagctcacgcacctgctcggtcatgccttggctggagagcccggcgagcactccacgcacctgcgccagcgacaccggctccggctcaggtgccggttcgggtgcctgtcggtgggcggcctcgtactcagcggcggcctgctccaggtcgggttgtgcgagcccggcggcggcgatcggacgagcgccgggcatcccggcgtgatcctcgaacccctcccacgcggtctcctcaattgcggcggcgagcatggtgacacctgccgcgtcggccagcgccatcaggtcgtcgtcggtgtcggcgacacgcacctcgacggtggaggcttcggagccgggcaggagcacggccatgcggtgctggggtcggctggtgccgaagatcgcgcgcagcatccgcctgctggggcggatttcttttgcagcgagtgcggcagccgggctgggatgcttggcgatcttgatcttgagcttggtgggcatccgggtttccttccatgtgagtggtggtacgccccatcaccgggctggtgaagggagtgccttgcatctgtcaggcatgggacgcaccgaaaccggacggcctacgactcggtgagtgttttgcgcagttgggccagaccgcgcgagacggctttccgcaccgcatcggcactggtcggctggcctgcgccggtcttgtcggcggcgatctcggtgaaccggtcgccgtggagcacatgcagctcgatgtactcgcgctgcgtcgcagtcagcggactcagcagttcgaccaccgcgaggttggcctcgacctgctcggtgaagtccggatcgtccgaggcgaagtaatccgcgcccagcccgccacgctcgtcgtcatcaccgtggccgggttggtcgacggagatgtcggagcggcggcgattgtccagctcgcggtactcggcgtacacgtcgtcgaggtaggcgcgagcccacttcggacgcgaagccgggtcgcgcagctgggcacgcagttcttcgctgtcgggcaggtcagggacgggtaggtcgatggtgttgcccctgggggtcaggtacgggacagtgaattgtctgttgaatgccacgtgagggcttcccttcttgcgaagggagaccccgttgagggcaaccgacgagagaccgtggtgttgagcggaaacagtgacgggcaccaacccgacccgggggtgaacccgggtacaggtggtgcccgtcaagcgctcaacggaggtctcccgaatacggttgaaaaacgcatgcgggtgtaggaggaaggcggccggccggtgaccggtacggctttgaccgccacagcggttgggctgtcctgccggatgacgtctggccagcaggacagccgtgagggctacttgcccttacgcggcttggcctgagccagcgccgaggctgcgaccgacttcgtcttggccgaggtgcgaccgtcgcgcagcagtgcggacgccttcttggcgaccggtcgagacgtctgcttcgtgtttcgtgtatccatgtccctgttcacctcctgcctcagctcgctccgacacggttacgcgttcatgaagatgaacgcgacaagagtgaagcggccttgtaagatcgaaggaacacaggttcgctgttcgcccttgtggttctaggttccccgatgacggttttctgatcggctgggaagcgatgggcagcgatgggtcgcgatggagaggcggtgcggtggattacaagtcgagcttccacgccgtcttggcgacggtgcgcccgctgatgaaaggcacccgtaaccttggcgagttcaccgcaggtctcatcgacatgggactcgtgcctcgcggaaccgtctacggcgagaagaccgcgcttgagatgcgcaagtcggcgacgtggaaggggtacgccaacgggtctgaccagctgcctactgtgttagcgagcgagctggctgggcgatgggatcagtttcggttcgccagcaacgtctcccaggcatacgaggagtcggcactcaatgacctagccgaccggctccacgaccttgacgagtcgatcaacaagggcaatgtcaccgaaggtctaggccagctgttctacaaggtgttcaccgaagctgccggtgagaccgctgccgtaacggagcccttgactttggcagacaaggccgaccgatctggcatcccgtacattgacgagaagacgaatcgcctcaggcttggcgaccgctcggtcgcgttaccgccgaagcatcccacaccggacacagttcagcctgctgagctggggtatgtttcggcgctcctggccgcgcattgcgaagacaaagcccgtaccggcgttgaggtgcagctggacgacatcccgtcgcgtctggttcaacacttccaagaacagcgcaaagcgttctaccgtgccgaatgggtacgagaaacatcgtggaactgcatccacgatgggcggccattgtttgacgagttcttggaaacgatgcacgcgggagtctccgacaccaacttgcgtcagtaccccaacggactcgaacgcctcctcgcgacactggctcaagcagccgcagtccaactcgacggtgtccggctcgaccagatcattgacctgatcgacgtgtggagccggaaaggttcctgccacgaactcgtcgcccggaaccggctgggatgggtagattgatgcgcgccacgtccctagacacaagtttcgaagctgaactgcgcgggctcatcttgctgttcctgctcggagatgcagcggatgccgactacctgggtgccctagacaccatcaccgtcaacgcccacaccttcggggtcggggcagagaacctcaacggcacccaccgactggccagcggggaactccacacgcgcacagtcctgatgacccaagctctccagcatttggcgatccaaggattcgtgacactacagccagatcgttctccggcggccttcacgattaccgctgagggtgaatcagtcgtcaaccatttccgctcccgatacgccggtcagttgttcgacaccgcgttggagacgatcgagcgggttggcgacctgagcacgagcgagctggctcagatcatcaggtcagcgaccccggaaggagaaacgcgatgacaccaggcttctggatcagcagcatcaccgtggccgggcaccccactcggcgggactccagcgtcggtttcgaatctggactcaacgtcatctacggaccgtctaactccggcaagtcctgggtgcttcagtgcatcgactacgtgttcgggctgaaagccgacgagttcgtcctcgacgaaaactccggctacaccgaggtgcgtatgggggtgcgcaccgcgcagggctcactcacgttatcgcgccccatcggtgagggagccaataacatcgaggtctccagcacagacccacgaattgagtctggaacctacaaacgtcaatcgtctggccgttccccgctactcagctcggtgtggctcaaactcatcggctacgacgcccctgaaaacctgaaaatcatcaagaatcaaaaccttgaaacccaggcgttgacgtggcgcaccttctggcatgcgctgtacgcggatgaagaccggatcagcaccaagaaaccaatccttctccctcttcagaccaccgcacagcccgcgttcaaatgcgccctagcgtcactgatcaccggcaaggactatgccgcctacgctcgtgatgagtctgtcgaaacgaggaaattgcgtaacaacgcgatcatcgactacctcgagccgctacccaaacagcttgaagaacgaatcgagttgatcgacaaagcactcggtagcagcgacccagcagagatccagcagcgcatcgatgagctgatcgcagaactggaacgtgtccagcaacgcatcacacacgccaccgtgcaggggcaagacgtcatcgcacgcctccaacaggtgcgtgactcgctggcggaatcccgcagtctgcggaaccgatacgaggaacttgccgcctcctaccgtgcccgcatcgagcggttcgatttcgtcgaggaaggccacgccctcaccgcacacagggaaccggcaacaacctgccccgtatgcacgcaggcactaccaccggaagcgcgatccgcagttccagagcccgatctgcgtgaacgccacgacctagctgcccgactcaacgatcttcgtcaaacgatccatcagatggatcttgaacaggcaccactgcaagaacaagagcaggatctcgccgcagaagccgagcgcatcgcccggcgcatcagcggcgagttagagccgcaactgcaagccctctcgacttcgcttgccagccacaacgcgatcatcgccatgcaggcagaaagagaacagcacctcgaacgcaaacaagccatcgaagacgaacttgaagaacgcaagaatcgcacattccccaagggcaacttcaatccgctcgacgaatacccgaaaacgttctggccgcagatgggcaccaacctgctcgacatccttggagcctgcgcgttccccagactcaaagatgcccgattctcgcgtgaactgttcgatgctgtcatcaacggcaaaaccaaagcggaggaagggcagggctaccggtcgttcgtcaacaccgctgtcatgctcgccctccgggaatacctcgcctccgaggacgccacacacaaccccggcctgctcatcatcgacaccccactactggggctcgacgatccacagctcgaccccgagcttcaagaagcccgtgaaaccatccccgctgccctctacgactacctcgccctcgaacaagacggcggtcagatgatcatcgctgacaacaccaagttcatgcccgacatagaaccactaaaggaccgatgcaaactcatcgtattcacgaaacgcgaaggagaaggacgctacggcttcctgctcgatgcccaggacgaagacctgatcgatctggaggaaacagatgacaactaaccgcgccttcagctacaagcccctctggaaactcctcatcgaccgcgacatgaacaaaatccaacttcaagaacgtgcaggcatcagtccagccaccctgtccaaactcggacgcggcggcaacgtcaccaccgacgtccttgcccgcatctgcgaagcactcgactgtgacatcgccgacatctgcgaggtcgtccccaccgacctgaagggagagaccgactagatgaccgctcaacgcctgcagctcacctggtacaacaaggacaaggctctcatccccactgagaccggcaagtacggctacacgtgggttgacccctctgatccgcgctactgcgaaacccacaccctcgtgctggacgactatgtgcaaggcagccagacaccgaagtctgacgagttcgcctactccgagcgcgctgacctggagccccaggatgacaacctgctgatcttgggtgaatcgggcgatgtcctcgaagccctcacccgcgtgcccgagcttgccgagaagtacgtcggcaaggtgaaactgatctacatcgatccgccgtttaacaccgcgcagacattcgcttcgtacgaggacaacctagagcactccatctggctgaccatgatgcgcgaccgactgcaccacatgaaaaagctgcttgccgacgacggctccatctgggttcacct

SEQ ID NO: 70 - DNA, 25150 bp, Propionibacterium acnes
ctggggccaggtatcttacgcctggccccagccacgaagcagatgacaaactcagtagatgaattcagctagagcttgacatgctgccctcttggtttcttcgctaggctcaacgcccgagtagccgtatgccccattggaaccgtctgtgagaaggccaacgtatctgtcatccaatgggccatcaatttctgcaaagaacttgtcctttgcggttcctccgtcgcttgcaccaacactctcagagatcgccttgaatcgctgcaatagcgaaactggattgttgtagtagctcctcagcgttcgggacagaaggttggggtcgtcggctcccgagcctttcagcatcgcagccagtttgatcgcatccccgtcgctacacaggtcggagtagttgcagttgttcggcagatcattggggatggtcaaaccttgaagtccgctgtgattcttatagttatccccttggccaacaagagcccttgctattgcaataatgtttgagccgggattcaggtcaacaaccttttgaatcggaccgagcgctgaagctaagtcacccgcccatcccgtccacttatcaggaacgagcgggttcaggttgatgtagcccagggtggtcacgctcatatgcgggatatctactgcaccacctgcggggtccgtccattcttgtcgatcggagcgaatccacttattcaaggcagagattatctgagacgcttgagtgtcatcttccagccttttcgcgtccgcctcccgatatgcttcagctgccgcggaccactttgcgcttcccttgaggtagaccgttgataggtagttgaggacacatcgccaagtcggaactttgacccaagtaacgtagctgccggatgtgatcggatcctctccgaaagcgtagtccttatagaccacgcgcaattcctcgaaccggctctcaagcgcttcgatcagatcgagaaaatctagagcgtcgtaattcactggctgcgcgtggcgcaccgacgaatcggctgacatgcgacccgaatatgccacgcggtcaagatcccatttcccccgatatccactgatttcgtggaactgatcaaatacccagttgtcggggatggggaaaccgagattacctgagaatccggtagacatgtcagaaacgaatgatgctaccgcgtatccagcctgagctatccgggtgcagatgtttcgcgaggcgtagatacccactcggtagccgccgccgaggctttgcgttactgccttgaagtagggcaggatgtggctggtcacctgaggatccgtggcatcgtagtcaacggcgaagtagatcactgtaggtggaacaccaagtcgttgggcagcggtttgggcctctttcgcatgacggtgcccattttcgacactaaagtacttaagttcagttgagtactcttgaaaaattgggaaatacttcagcccatgaccaacgattcgctctagctcgcctgtgcggagcgccttgaaatagtctgcctcagacttactgctttggttgggttcactgagatagcggcctacgatctgataaccatcagccttaagatgtccagcaagctcgtcagtgatctcaaagcgcgtatcgcaagccacacatggccgattggggtcgcctttagaagtgagcaggctcatccatgtggttgggtcgaccaccccggtcactggcaaggcgtgtgcttgctggaactgccacagcgtgttgctgatttcgctgttccacgtgctggtcggcaaaatggagtagccgttgcagaccagactcacagtggctagccatacccactggttagtgccgctactaattgtccgtagtttggagcgagtgcctgcaccaaaattcccggtggcttcggcaggtgtgtatccttcgattgcttggaggacctggattaaagccgtgttcatttcacgcccgtacaagccatcagtgggaatgatccctgtgtagttcttgtacccacggttaatcgcttgctgtgcctgacgaatagctgtcttgccgccgtaggcagagagtaaccggaactgtttcattgacagaagcgccatcattagttcaacatcgaccgttgcgctcgtatcgccaaggccaatatcgactttcatctggcgaatagagtcggccaagtggtcggtaaactcaagagtgatgccaccgtattcggctcgatatcccttgcaccacaaggctccttgaataatcccatgaacattgtcgtagccagaagtttgagtaatgccgtttggccaacgagacttgaatcgagactgtgttccagaaccgaaattgtttgccgtcgctgtaatacccagttcgatttgcagagcgcggatgagtgcgttgattgtatcccagccagtgttaccggtttcttggactgagccgaacccagttttattgccgtaagtcgaattcagccactgctgagttttcagcaccatttgatctgccatgattcctccttcagaaatcagttgttaactcgaggcaggcgaacacctgccacggaggggtccagaacaccggatgagaagctccgagttttttgccctcgcctgtacgtcaccgggaaacccgaatccggacggcaagagcgaaacttcgcgagtttcatccctcactggtactgccgacgaagcccgaagtgttaataccctgtttgattctgggactttgcgcgcagttggccccgcccgctgacctgtccgagcgtcgtagagatcgagaggccccaaccccctcgccagcgccgccaggttcccccgtgtctgccgatcagcaccgaggtgggcatctttgaggtttcgcaacctcggcgcgacgtggcgcgacgtggcgcagatttcagtaggtgtagatcctcggggtctgcctccaccggtcgccgtcgagcgccgactggcgggagtggcacggcttacacaaactgcggaggttggcctggtcatgggtgccgccgtgctccaacgggatgacgtggtggacttcctgcgccggggtgtaccggccagccgcgaggcagtcctcgcacaaggggtgggcggtgatgtaggcggtacgaatcttgcgccagcgggccccataacgtcggttgatcttcgggtcacgctgccacttgcggtagcgctcgtcctccgccttggcgtgggcttcgcagaagcgggcgtgggtgaggttcgggcagccgggctgggaacacggacgggcaggcttgaccggcatcacgcacccctttcccggacacggcaaagccccaaggcacccagccgatgaccgggcttgccctggggcttttcctacttttcaaccacctacatcattgcaggcccgaaaccctaaatgcatccgcagttcttgacaccttttggcggctaggttcacgcggcctgcccatacagcgccgacgccagccgggcgagcgcccgaaacttcttctggtaggcgctggtgcgctccacgtagaagtggtcacacaccgtttgcaccgcctcatcctgggtaccgtcgccgaggaagaatgcttcgagcacgaacctgtcgtcgtcggtgagcagctgccaggcgggcaggaaccacgccatgtactcacgcgcctgggcgtaacgggcacggtagatgtcgatccgatccaacgtggccgccacccgcatctccccagcatgcagatccgtgtggcggggcatcccgtcgagtttcgatgaggctggggtggtgacgtcgtcgtaggcggtcttgatctgctcgtcggtggtgtcgatgatctgctccatcacggcgaagtcctgcaatgcgctgatggctgctttgcgggtgtcgaggtatttggtcatcacatgcatgacgactccttcctgcttatggttgtgagttcggtggcgaccgcgtcgatcaatgcggcctgggtcatgtccttcgcctccagcgccttgaggacggcttggtcgagggtgccggtggcggtgaggtgggtgatggtgacaggctcggcctgtccttgtcgatacagccgggcgttggtctgctgatacagctccaagctccaggtcagcgagaaccacacgagcaggtggccaccggactgcagattcagtccgtgcccagcggaagcggggtggatcaggccaagcgggatgtcgccccggttccacgcctcgatgtccgccgacgtcttcagttcgcgggcttgtgggaagcgacgctggatgcgttcgcggtcgtgtcggtaccagtaggcgacgaggacggtttggccgttggcggcctcgatgatgtcttcgagggcatcgagtttcgccccatgcacctcgaccgtatcgccgtgctcgtcgtagatcgcacccgaggcgagctgcagcagcttgcccgacagcgcggctgcgttcgccgcatccaccacctgcccatccagatcaaccaccaggtcggccttgagctgctcatacacagctcgttctccggctccgagcaccacgggcgtggtcgtcaccgtcagatcaggcagcgtgaggtggtcggtggtgcgcattgacaacgtcatgtcggcgatagcgtcgtagatttcctcctcagcgcctgccctcggcttgtacgtgaacacctgcatcccgttgcgcttatccggcaggaaccacttgtcgcggtagcgggtgatgaatctgccgaggcgttggccgccgtcgaggagccggaattgcgcccagatgtccatgagcccgttggaggcgggggtgccggtcaggccgacccagcgcttcacgtgtgggcgcattttcaccaacgccgtgaaccgcttcgcacggtggttcttgaagctggagagttcgtcgatgacgaccatgtcgaacggccagctatcgccgtactgtctgacgagccaggggatgttttcccggttgatgacggtcaccatcgccgacttggccagcgcgtcgagccggtcagctttggtgccgaccgcgaccgccaccgatagaccttggaggtggtcccacttggctacttctgctggccaggtgtcgcgggcgacccggagtggcgcgacgacgagcacccggctgacggtgaagtagtcgagcagcagctgccagattgccgtcagggtgatgacactcttgccgagtcccatgcccaggaggatcgccgcttcgtggtggtcgaggatgaaccgcgtggcggtctgctggtagttatgcggccggtagcgcatcaagcacctccttgatgccgtccaccgagtcaacgaccagcgcggtgaagccgtgggcggccagttggctcatccggcggcgttggatcggccgaggcttcttgccgggggctttcacttcgacgaagacgacctggcctcccatcaggcatagccggtcaggtacgcccgtggttccagggcagacaagcttccagcacaagccgccggatgcctcaacggccttcttgagctgggcttcaatgtggtgttcgttcatggtcactccttgagtggtttcccacgggggtgacgactggtgacgggtggatctggacttttctaaaggagatatttttgtggccttagtaatagttcaatactgatcgtcaccggtcgtcaccctcatcgggtttagctgttgaattcgctggtcagagccagtccgtagacgtacatgccatgcttggacttgcgtcgttcaaacccggattgttcgagagtggcgttgaagtcggccatcggccgagcccacccgctggtggattgcgcccacgctcggtactcctggtacaggtcaccggcgcgttcggatagggacgggtccacctcgcagcgggcgtcgaggaattgggcgaaccagttgttctcttcccgatatgcgcttgaggcagcgaccacttgggcgggtggggtgagctggtagtcctcggcgtggatgagccgcgagccttccatgatccatgcaagtaccgctccgccggcggtctcgtagaggtggtcggcgtagttcttcacatcggagctactctcgatgaccgcgttgaacgggatcacgatgagcctgcgccagatgcccgcatccatcgcgcccaccctgggcaggtgattcgtgtagaggatgagcgtgtgggatggggtgaacgcgaacggtgccttgtatttcttctccgcgtagatctggtcggtggaggcgagttgcttgaccgtggaggtggataggcgcacgccttcctcggactctgcggcgatgatgagccgtttgcctttcgcttcggcaagctcaggtttgacgttccggttcccgccaatggtgagcacgtcggcggacatgttgcccgcatacgtgccaagcactctcgcgatagtgttccagaacgtggacttgccgttgcggccgtccccgtaggcgatcacgagggcttcgaccatgaccgtcccgatcgctgccagcccgacgatccgctgcacatacccgatcagctcccggtcggattggaagaacacgttgagcgcccggttccagatttctgcgcccgtgtcggtggggtcgagcgcggtttgtttcgtgatcagatccagcgggttatggtcacgtcgggtgccgtcacgcacatcccacgtgccgccaggcgtgttgaggagatacgggtcagcgtccagccgggctggggtggtcagcaacatcgggtgtgcttccctcaggcaggaggtgatcgcccgggactcgcggcgtttcaacacgaacgcctcgtatgccttcgcgtcctcaaatgcccggtaggcggcccgctgcggtgaggtgaaaccgccgagtgctttcgctttcgacgatgcggctgcgagcaccgcgttcgcgcccgtcaccatgagctcgtcgcgggctttctccagcagatgcccggcctcggctagttgccggtcggtcagttcctgggcgatgccttgcgcagcaggcgcagactcagaccacacaccgccttcgtagacgagccagtccgtggcctccgtaaacgccagacgcgacgagtattctgcggtgagcatggatgcctgcccgacatcggtgaagtcctccggccgcaggctcgtcagctccgcgtaggcttccggcgacagataacccggctgcgcctcgactttggcggcgaaccggcaggcgctttgccagatcgactccaactcgtgatccgacaggggcggttcacacagggacgctttccggtcgaacaggtcacgagcttgggcggtctgcccgtaacggatcaggacgcgtccggcgaagcgggagagggtggcgttgcgggagccttccccgatcacctgcgtggaagcgtcgaacgcggcgaacacgtcgatctcgtcggcctcatccagccaggcgtcgagcagctttgtgccgttgtggatggtggtttcggggttggtggtgccgtagatgaaccgtccggcatccaacgcctgcgggtcgaagaacccgaaccgtccagcgaggcggcgcttcaaccccgcataggtgtcggcgtcggtgaccgggctgattgggaagtagacgtggaagcgaggcctggccgacagcgtccttttcggcttctggtggttacggctggtggcggtcatgaactcaacccccgccatcagctcggccaggtcatctggggtgatccactcgtcggggttgtcggtgtggtcgttgtcgatatccatcacgacacagtccgaggagatgaagctcgccgaggagcgccggtcgccggtgtaggtggcggcgacgtgatccaaccacgccacctgctccagcgaggtttggtcggtgatgtggtggtggttcgggtaatggttattgtgcgggttgccgctactcgtggcggcgcacaaggtgaacggagtcatgcgggatgcacctcctggaagtcggcgtcgaagaagcggatcgggatatccatctgatgggcccagtcgatctccgcccgcatccccgggctgaccctgccgatataggcccacagctgctcgcatttcgacagcaggatgcggttgaaaaacatcgccagctcccgggcatccgggtcggtgtcatccatgaactgcggataatgcaaatgcggagccaacgggatctgacgagcctttaccgcaaacgcacaaaaccggcgggcaagctccacgttggctgctatgtcacccgagtacggggagcagatgtagaccaatgggcgttagccgtattcggcgagctggatttctttcagcgcctggtagcaggtcgggtcggggtatccgtcggcgttgcgcagcggaatacccacatcgatggtggcggtcatcaggcgccctgaccttcacgttcgatcaccggcagcaggccacgggtgttcttcaacaggtcgtagatgaacaggcgacccttctgcgtccagtacatgtgggtgcgggtcttgccctcgtcgtactcgtgcgtcttggactgcgtgtagccctgctcggcaaatttcgcgtagaggaaccagcgtccggactggtggaactgcacctgctcctcgcgcagaatctggttaagcttcttcgccgacagcccgtagtccttggcgatctctgtggcggtgatcagtgagggcgatgccagcacgatgtcgtagtacgacaccttcggtgccgcctccaacaaagcttgctcggcggcgagccgcttggcacgttcagcccggagcgtggtgatcgcccgctccagaaactcgtcgtcagcgagcagttcgtcgatggcgtagataccatgtcggcggatcgtcggcagaacctcgtcgaacacccacgtctcgaacttctgggcggcaggaagtttggaagtgacgatcagccggtacaggtcgccttcgctgatgaacctgacctgctgaaccccacctgctgtttcaagggggtagtgattcacgactcccttgcagtgacgtgccagagcgtccttcgtgttggcgtagccgagggctgtagccacgtccttgccgcagaacaggatctgcccgctagaggtgatggttcggattgtgccgaactcgtggttggtgaacacttgtagtccggtagccatgaccagctcctattctgagagccaagtagacaatcggcggcgcggggtgcgccaggctctcacctgtcaggcacggcagacaccgaaaccggacacggcttgaggaaggctctcgcccatacgcccccgagcaccgacaaatccggacgggtcagagggcacactggtgtgtgaacgtaccgataactccgtgccccgtgctcttgcttcggcgtcatcaaccaggtagccttgtagtcaacatgaccggttccgctgcccgcctcggtgggagtccagggccggtcttcgtttttcgtatcaaacaggggtgcgcgtggagcaggtgaagcagttcaagacctacggtgaacaggtcgaattgcttcgtcagcgtgggatgcgagtgaatgatccccagcatgctgagacgctgctggcgcgattgaactactaccgcttgtccggatactggtacccgatgcgccgtttctcccaaggcgacggcactgcccgagatgaattcgttgagggagcatcgtttgacctggtggtagccctctatgggtttgacgaacaattgcgccacagcgtgttcatcgagcttgatcgcgtggagttggctattcgaaccaagctcggtcacgaactgggtcgccttgacccgctgatctatttggatcccaagcgtttgagcgcccgggcacggcagcgaaacaaagacgggcgtagcgtgcacgaggtgtggctgagaaagtaccagtcggcattgaaagcgtcgaaggaggacttcgtcgcccaccacaaatccaaatatggcgggactctacccatctgggcggctgtcgaaatcatggattgggggatgctgtcgtacctgtacggcatgtcgcccaatatcgtgcgcaaacggattgccgagccctgcggcctaactggtcctcagcttgaatcatggctgaaatccttgaatattctacgtaattacgcagctcatcatgcaaggatgttcaaccgtgtttacgacatcaaaccgaaactgaacaatggcgtcaggctggctccggtagctgaaggaatgaatcgcgtgttcgggcagctctcccttatccaatacttgcaccgccaactggacttgtctccagccgaccggctaccgaagctgttccacacctacccgcacaatcccatcgtgccgttttctcgcacaggagcacctgacaactggcgcgagttgcctctctggtgcgtctaatccttgcggtagtagtcgcattcgtacccgtcggcgtcgagtggcagtcctgctgcccagtcgggtggggtcgtcatgagctggcaggcatcggcgatggtgaagccggagtcctcgggttcgtcgatgacgatttcgtcgtggacgtgcatgacaatcttgtgcccagcctgagcgacgagtgtcatggcgtggacgaggaggtcacgagcgactgcttggacgatgttctcgacgagtttcccgccgtaggtctccagccgcccccacttgcgtccggtcgtgacaccgctgtaggtgatggaggtgccgccccaccggttctcaccaagctggggcttcacgtaggccagccgcctaccagagggcagggtgatgaacaagatgccggactcggcagtgaagcgaaggttgcgcagccgaacagcctggcgggtggtgatggcgtcaagtgcggcctgctcgacatccgcccagagtcgcacgatgttggggttggctgcccgccaggcgtcgacgatgggtttgagttcgtgctcggccagccccatccgtagggcacccatcgccttgagcgctccgacggagccgttgtaaccgcaggccagcgtggcgatcttccccttctggcgcagctcagcgttgatgccgtgtttttcgacggggacgccgaacatgcgcgacgcggtctcgcagtagaggtctttgccgtcgcggaaggctgccagggtggatgtttctccggcgagccaggcgatgacgcgagcttcaatcgcggagtagtcggcgacgatgaatcggcatccggcgctggggatgaacgctgtccggatcaactggctgagcgtgtctggcacggagtcgtagagcagttcaagggcgtcgaggttgcgttgtcgggtgagggtgcgggcttggtcgaggtcgggcaggtagttacggggcaggttttggacttggacgaggcgtccggcgaatcggccggtgcgtcccgctccatagaactggataaggccgcgtgccctaccgtccgtgcctgtgacgttatgcatcgcctggtacttcttcaccgagcttttcgcgaggtcgccgcgcagctccaggacttctttgaccttgcccgtggcggactcgagggcggcttcgacatcagccttcgccaaggacgacatctcgcagccgtgggtggtgagccattccttcaactggatcggtgagttcgggttctccaacccggtcaactcccgcgcccgcgccaacgtggcggcacgatgctggtcgtccagggcgacggcagcgtctgcgagggtgtggtcgagcaggatgccggtgtcgttgatgcgttgatccagggcgtaggcgtcccactcggcttcgggaatcggaaacgatgagagccggtcgtggatcgcgagttcgacctcgacgtcgcgctggttgtagtcgatgaactgagcccagctggtcgggtcgctgctgggcaggttacgggtgccgccaccgttgagcacgctgggtgtggctggcgtgcagaattgcttgatcagccgcttacccgccgtatccttctgaacgtcaaggtcaagagccgcaccgaccgcatccaagctcatcggcagaccgagttaagccgaccacaccatcgtgcagcgccactggctcgggtcaagaaacccggccgccaacagctcggggtgatgacgctgcagccacgcggagagcgcgacccgctcgaaggcggcgttatgcgcccacttggccacgcccgggtccaccaatgctgcgagcacctcgtcgggcagcccaccaccactggcgagatcgacgacttccaccgggccgccgtcgatcgagtagccgaagatgaggaggcggaagtcggggtgttcggcatacgggtagacgccggttttcgctaggggtgctgggctgaaggtttcaatatcgatagcgatctggcgcatcagggctcctggacagtcgggtaggcgaaggtgagggagccaaccggtgtttggtggctccctcactgctggggtgctacttcgggtcgaggttgtaggtggcgttcatcctgtcgagctcggccttctccttggcgatcagctcatcgatgcgctgacgttcgcggcgtttggcccgcttgtccttaatccagtagtagccccagaccatccagaacgggatcaggacgtagacccacacggcgagggtgatggcgttgaaacagtcactcatgattcagcctccttagttgaggaagtcgtcggccggcgcgccgaagtcggactcagcggagacgcggcctgcgccaaggggttcaccgtcgcggatcttctgaatgttgcccagcccgcacgccacacccttgttcccgttcgtgttgaacgcgtagaacgacagggagacgcgggcgtagcaacccgagtacacctcggaacggtcaaggatcggagagacgttctcgtccacaacctgcggcggagtgaggctgttggcgttgacgaagaagctgtttgcgtaggcttcgtcgtcacgctcggtatccccgtcacgcagcggcagcttcagagccgccttgttggagcgcttgcctccgaacttggccgtaccagcgtcgatcgccgcgtcgatggccttctcgatagctgtgatggtggtggtgtcggccttcgggatgatcagcgacacggagtacttgggcttgccgccctggatggagttcggctcccacacgtgagcgtaggagaggcggacttcgccggtgacgacgcgggtggggttgttggttgacaaggttgttacctgctttctgttttcgtgaattcggtttgtgcgctgtggatttccagcgcgggtcgtttgtcggtgtcagacacgagcgtcggcttacccacgggcttgaccacgaggtcgccgagcacctcgttgaaggtcttcttgtccatgagccgttccatcgcagtgagcgtgatgagtctgcggtcgtagatgtcggcgtacccggcagcttcagccgcttcggcgacggcgttctcctccgtgtacttgcggacagaccgtccggcgacgagcttgaaaccatcccagtgcttgccctggttcaccgcctgcgagagcgcgtaggcctccacatccgcagcccacgttttgagctgtggaatccttgtcagcacgtccgcaatctcgctgccggacagctcggccggtggggcgaactcgtgctgggcgagcgcgaggttggcttcggcgcgtgctcggcacgtcggtgcgatgcggcagaactggcaccacgagccgggacagaactcgcccccgcccgccgcagccaactcggccttcggcttcacctcggtctcagcccatgcgaggaggtcggcgacgctggtttcccaagtgtcaacgttgccccgccggggctggtagatcgtcaccgcaacatcggtgatgtcatacaagtccccgaaagcgtggacggctccgagcgcgtacaacatgagctgcgggttgtgtgcggcctcgacgaggatgccctgcccgtacttgagatcgatgatctgcagcttgggttcggcgatgatcacgcagtcgccggtaccgaaaccgcccggcacgacgtgggagaagtcgaggcgctgctcgatcagcacctgcggatcaccacaggcctcccgtgccagtgagatgtgttcctggacgaaggcgacgtagtcgtcggtcaggtcctccatctcggtatcgatccagccggactcgggcttgaaagtcggcgcgtcgttcagggcacgccggagcttccactccgccagggcgtgtgcgacggtgccctgctcggccgccgccgacgtcgagtccggctcacgggattccagcaccgcgctgggtgggcagttcagccaccggtgcgcgcccgacgccgagagcagcgcatgctggtcaggcatcggacagctccttcgccttggccagcagccacccgtacttcgtcgggtcaaccgccgacagcttgtccgcgccggtggcgacgatcagctcacgcacctgctcggtcatgccttggctggagagcccggcgagcactccacgcacctgcgccagcgacaccggctccggctcaggtgccggttcgggtgcctgtcggtgggcggcctcgtactcagcggcggcctgctccaggtcgggttgtgcgagcccggcggcggcgatcggacgagcgccgggcatcccggcgtgatcctcgaacccctcccacgcggtctcctcaattgcggcggcgagcatggtgacacctgccgcgtcggccagcaccatcaggtcgtcgtcggtgtcggcgacacgcacctcgacggtggaggcttcggagccgggcaggagcacggccatgcggtgctggggtcggctggtgccgaagatcgcgcgcagcatccgcctgctggggcggatttcttttgcagcgagtgcggcagccgggctgggatgcttggcgatcttgatcttgagcttggtgggcatccgggtttccttccatgtgagtggtggtacgccccatcaccgggctggtgaagggagtgccttgcatctgtcaggcatgggacgcaccgaaaccggacggcctacgactcggtgagtgttttgcgcagttgggccagaccgcgcgagacggctttccgcaccgcatcggcactggtcggctggcctgcgccggtcttgtcggcggcgatctcggtgaaccggtcgccgtggagcacatgcagctcgatgtactcgcgctgcgtcgcagtcagcggactcagcagttcgaccaccgcgaggttggcctcgacctgctcggtgaagtccggatcgtccgaggcgaagtaatccgcgcccagcccgccacgctcgtcgtcatcaccgtggccgggttggtcgacggagatgtcggagcggcggcgattgtccagctcgcggtactcggcgtacacgtcgtcgaggtaggcgcgagcccacttcggacgcgaagccgggtcgcgcagctgggcacgcagttcttcgctgtcgggcaggtcagggacgggtaggtcgatggtgttgcccctgggggtcaggtacgggacagtgaattgtctgttgaatgccacgtgagggcttcccttcttgcgaagggagaccccgttgagggcaaccgacgagagaccgtggtgttgagcggaaacagtgacgggcaccaacccgacccgggggtgaacccgggtacaggtggtgcccgtcaagcgctcaacggaggtctcccgaatacggttgaaaaacgcatgcgggtgtaggaggaaggcggccggccggtgaccggtacggctttgaccgccacagcggttgggctgtcctgccggatgacgtctggccagcaggacagccgtgagggctacttgcccttacgcggcttggcctgagccagcgccgaggctgcgaccgacttcgtcttggccgaggtgcgaccgtcgcgcagcagtgcggacgccttcttggcgaccggtcgagacgtctgcttcgtgtttcgtgtatccatgtccctgttcacctcctgcctcagctcgctccgacacggttacgcgttcatgaagatgaacgcgacaagagtgaagcggccttgtaagatcgaaggaacacaggttcgctgttcgcccttgtggttctaggttccccgatgacggttttctgatcggctgggaagcgatgggcagcgatgggtcgcgatggagaggcggtgcggtggattacaagtcgagcttccacgccgtcttggcgacggtgcgcccgctgatgaaaggcacccgtaaccttggcgagttcaccgcaggtctcatcgacatgggactcgtgcctcgcggaaccgtctacggcgagaagaccgcgcttgagatgcgcaagtcggcgacgtggaaggggtacgccaacgggtctgaccagctgcctactgtgttagcgagcgagctggctgggcgatgggatcagtttcggttcgccagcaacgtctcccaggcatacgaggagtcggcactcaatgacctagccgaccggctccacgaccttgacgagtcgatcaacaagggcaatgtcaccgaaggtctaggccagctgttctacaaggtgttcaccgaagctgccggtgagaccgctgccgtaacggagcccttgactttggcagacaaggccgaccgatctggcatcccgtacattgacgagaagacgaatcgcctcaggcttggcgaccgctcggtcgcgttaccgccgaagcatcccacaccggacacagttcagcctgctgagctggggtatgtttcggcgctcctggccgcgcattgcgaagacaaagcccgtaccggcgttgaggtgcagctggacgacatcccgtcgcgtctggttcaacacttccaagaacagcgcaaagcgttctaccgtgccgaatgggtacgagaaacatcgtggaactgcatccacgatgggcggccattgtttgacgagttcttggaaacgatgcacgcgggagtctccgacaccaacttgcgtcagtaccccaacggactcgaacgcctcctcgcgacactggctcaagcagccgcagtccaactcgacggtgtccggctcgaccagatcattgacctgatcgacgtgtggagccggaaaggttcctgccacgaactcgtcgcccggaaccggctgggatgggtagattgatgcgcgccacgtccctagacacaagtttcgaagctgaactgcgcgggctcatcttgctgttcctgctcggagatgcagcggatgccgactacctgggtgccctagacaccatcaccgtcaacgcccacaccttcggggtcggggcagagaacctcaacggcacccaccgactggccagcggggaactccacacgcgcacagtcctgatgacccaagctctccagcatttggcgatccaaggattcgtgacactacagccagatcgttctccggcggccttcacgattaccgctgagggtgaatcagtcgtcaaccatttccgctcccgatacgccggtcagttgttcgacaccgcgttggagacgatcgagcgggttggcgacctgagcacgagcgagctggctcagatcatcaggtcagcgaccccggaaggagaaacgcgatgacaccaggcttctggatcagcagcatcaccgtggccgggcaccccactcggcgggactccagcgtcggtttcgaatctggactcaacgtcatctacggaccgtctaactccggcaagtcctgggtgcttcagtgcatcgactacgtgttcgggctgaaagccgacgagttcgtcctcgacgaaaactccggctacaccgaggtgcgtatgggggtgcgcaccgcgcagggctcactcacgttatcgcgccccatcggtgagggagccaataacatcgaggtctccagcacagacccacgaattgagtctggaacctacaaacgtcaatcgtctggccgttccccgctactcagctcggtgtggctcaaactcatcggctacgacgcccctgaaaacctgaaaatcatcaagaatcaaaaccttgaaacccaggcgttgacgtggcgcaccttctggcatgcgctgtacgcggatgaagaccggatcagcaccaagaaaccaatccttctccctcttcagaccaccgcacagcccgcgttcaaatgcgccctagcgtcactgatcaccggcaaggactatgccgcctacgctcgtgatgagtctgtcgaaacgaggaaattgcgtaacaacgcgatcatcgactacctcgagccgctacccaaacagcttgaagaacgaatcgagttgatcgacaaagcactcggtagcagcgacccagcagagatccagcagcgcatcgatgagctgatcgcagaactggaacgtgtccagcaacgcatcacacacgccaccgtgcaggggcaagacgtcatcgcacgcctccaacaggtgcgtgactcgctggcggaatcccgcagtctgcggaaccgatacgaggaacttgccgcctcctaccgtgcccgcatcgagcggttcgatttcgtcgaggaaggccacgccctcaccgcacacagggaaccggcaacaacctgccccgtatgcacgcaggcactaccaccggaagcgcgatccgcagttccagagcccgatctgcgtgaacgccacgacctagctgcccgactcaacgatcttcgtcaaacgatccatcagatggatcttgaacaggcaccactgcaagaacaagagcaggatctcgccgcagaagccgagcgcatcgcccggcgcatcagcggcgagttagagccgcaactgcaagccctctcgacttcgcttgccagccacaacgcgatcatcgccatgcaggcagaaagagaacagcacctcgaacgcaaacaagccatcgaagacgaacttgaagaacgcaagaatcgcacattccccaagggcaacttcaatccgctcgacgaatacccgaaaacgttctggccgcagatgggcaccaacctgctcgacatccttggagcctgcgcgttccccagactcaaagatgcccgattctcgcgtgaactgttcgatgctgtcatcaacggcaaaaccaaagcggaggaagggcagggctaccggtcgttcgtcaacaccgctgtcatgctcgccctccgggaatacctcgcctccgaggacgccacacacaaccccggcctgctcatcatcgacaccccactactggggctcgacgatccacagctcgaccccgagcttcaagaagcccgtgaaaccatccccgctgccctctacgactacctcgccctcgaacaagacggcggtcagatgatcatcgctgacaacaccaagttcatgcccgacatagaaccactaaaggaccgatgcaaactcatcgtattcacgaaacgcgaaggagaaggacgctacggcttcctgctcgatgcccaggacgaagacctgatcgatctggaggaaacagatgacaactaaccgcgccttcagctacaagcccctctggaaactcctcatcgaccgcgacatgaacaaaatccaacttcaagaacgtgcaggcatcagtccagccaccctgtccaaactcggacgcggcggcaacgtcaccaccgacgtccttgcccgcatctgcgaagcactcgactgtgacatcgccgacatctgcgaggtcgtccccaccgacctgaagggagagaccgactagatgaccgctcaacgcctgcagctcacctggtacaacaaggacaaggctctcatccccactgagaccggcaagtacggctacacgtgggttgacccctctgatccgcgctactgcgaaacccacaccctcgtgctggacgactatgtgcaaggcagccagacaccgaagtctgacgagttcgcctactccgagcgcgctgacctggagccccaggatgacaacctgctgatcttgggtgaatcgggcgatgtcctcgaagccctcacccgcgtgcccgagcttgccgagaagtacgtcggcaaggtgaaactgatctacatcgatccgccgtttaacaccgcgcagacattcgcttcgtacgaggacaacctagagcactccatctggctgaccatgatgcgcgaccgactgcaccacatgaagaagctgcttgccgacgacggctccatctgggttcaccttgactacgcggagaaccaccgtatgcgactgctgctggatgaggtcttcggttgctcaaacttcattgccgagttcgtgtggcagaaagcagactcgccgcgaggtgacgctcaacgtgtttcggtggatcaagatgtgatcctttgctatgccgcgagtggaagcacagtcatgaatcgtatggaaaggactgccgcagataacgcccgcttcagtaatcctgacggcgactctaaaggtgtttggttcagtgataaccgctccgcgcccacaaacgttatgtcttggcagcaccctagcacctttgcaattcagcacccaatcagtggcgagatgatctacccggccaagggtggatgctggcgttttggtagagaacgtctccttgagtcattgaacgagtacgcggagtatgcaagcggtgatgtagacattgcggctcgggttgcaaacacatcgcttcggtcagatcaggttcgttcagacattcctgacctggtattggtcgaccccgcttcagcggctcaatgtgctcacacaagaattgatgatggaaattggccagaattcttcgtgactgcaaccagcttcggcagaaagtcctatcctcctaatgaaggtcagcctgcccgttcatggtggcctaatgatcaggtgggacacaatcgcgaagctaagtcagaaataaaggctctcttttccggtgcgacgcctttctctacccccaagcctgaacgtctcctcgaacgcatcattcatatcgggtcgaacccgggcgacattgtgctggatgtgttcgctgggtcggggacgacggcagccgtcgcgcagaagatggggcggcgttgggtgacgtgcgaattgctggagtcgacgttcacaacgtttacgcgtccccgtctggagaaggtgctcaacgatcaagacccgggcgggatcactcggactaagggcaaacgagtcgacgctacggaagacgggctgcctgatggtgtctcgccggaggacgccgcgaaattcacgagcgtgctcaacaagctgatcaaggacgacccggaattgaagaaaagcatcgaggtgaagacactgaaggctgcctcgaagaccagacgcacgaaggaagtagtgaactggcgtggtggcggcggcttccaggtcgcccatctgtcgcctgcgtgtttcgactacgcccctgaactggaccgggtgatgctaactgcggccgcgaccggacagactctgatcgagtcggtgactgccaacctcgggttcacactgttgcacccggatgatgactatatttttgatgcccgccgtggcaatgccttgttgaaggtggtggagggtgtggccacgaccgagatcgttgactggcttgcttcccaaatccagcccggcgagacaatcgtgctggccgccaccacggtgatggacggcgtgcgccagcatctgcgcaaactggtgaaggggtcgcgggtggtcgcattgcccgatgatgtgtttcggtacagcgaaggtggtgaccagtgatggcgaacaggctcaacatcagttttgactccgacatgctggagtcgatcagtgccgagttcgacctgcgtgctccgaacaaggaagcactgcgccagctggtcttcactctcgacggtgactatgacccgaccgtgatgcaggtgctcaacctcgctacgggcgtgggcaagacctacttgatggcggcgtttgtggagtatctgcgccgccaaggtgttggcaacgtggtgattgtgacgcctggtaagacggtgcaggccaagacggtgcagaacttcacgcctggttcgtcgcgctacattactggttcggcgcttccgccggaggtggtgactccgcaggattattcggcgtggatcgcgcgtcaaaacggcccggtgcaactcgcgttcgggcgagagactccgatgttggcattcattttcaatattcagcagttgattgcccctaagtctgatgagggtgacactttgggtggtacgcaggatgcgatgcggcgtaagcctcgccgtttcgatgagaacgccggggtgcttttcgattatttgaagggtcttgatgatctggtcgtgatcgctgacgagtcccacctgtacgggtcgagtgcggtggcgttcaatgcggctttaagagaactggatccggcggcggcgattgggcttactgcttcggtggataagaaaaccgatcacgtgatctatgagtatccgctgtatcgggcgatccaggacaaatacgtcaaagccccggtgttggctttccgtaagagtgggtatggcacggacgaggcctctgaggaacagcagttgcgggatgctttgcagctgcgggcgatcaaacaagcccactatgatgcttatgccgccagtgaaaaccgtgctcacgttaacgccgtggtgttcgtcgtgtgttcggacgtggaacacgctacccaagtagcggagcttttgcgtaccccggaatatctcgggcgtgacgaggcagtgttgcaggtggactccaaacatgaggacgagctgacgcagcgccgcttgaacgagctggacctgcccggctcgcccgtgttggcggtggtgagcgtgaacaagctcaaggaaggctgggatgtcaagaacatcgcggtcgtcgtgacgttgcgggcgatggcttctgaggtgctcactcagcagacgatggggcgcgggctgcggctgccgttcggccggtatacgggtgtgtggcagatcgaccagctcgacatcatcgcccaccaatccttcaccgagctgctcaacgccgagaacgtgctgcagcagttcggcctggacgaagccatcgccgagcccgacaaagccaaggtagaagaggcgatccgtaaagccgccgaagagtccggcacgggtacaggtacgcccacgaccggcggtgaccaaccaacgacgacaaccggttctgaaccgggcaccggtgtcagtggtgaggtcgccggtggtgtggctccgcagccgggcaccgttcccgtcggcggcagtgattccccgggtgcgggtttgcccggtatcggggttcgcaccatcaccgaacaggaggatcagcccacctgggagttggtttcgatcggacggaacccgagctttgctgacgtgtcctaccgattcccggtgacgacgatgactgtgcagcagccgcccattgacctgtcagaaatcagtgacgccgagattgagcaagcggcgcgtcgggtcacctctgctggggacgtgctgctgcgcaaagagatcatcgccgccctaggcaagaaactccgggcagaggatcgagaaagcgccgaagtcgactccgtccacgtcgacgacgccgacgccgaggaggcgctggtcaaactagtgatcaacatgtcgctggtgcccaaaaccgaacagaccgcccgctacgtcgccacgttcctggtgccgaagttcatgcgcaccgtgacgttcaccggctggaccgtcaaatccctcgactccgcccgcgccgaactcctagcgctgatcaagaactacacaaccgagacactgcgagccacccgcgaggtgccgaccatacaccccaagtcgatgccaggcaccggctacacgctcccgttgggtgagaaggtgcatgaccagatcgagagtcgtgaccagttcgtgcgaggccgggtctacggcggctggttcaagtcgctattcgccgaggagtccttcgactccttcaccggcgaataccagcttgctcgcctgctcaacacgtcgccggggatcgtgtggtggcatcgcctgcatccgcaagaccaggcattcgtgtactacaacgcgaaagaccgctacttccccgacttcgtagccttggacaccaacggggtgcattggatcatcgaaggcaaggacgagcgcggccgcgatgacgccagggtgcaggccaagcgtaaggctgccgaggcgttggtgcgccggttggtggctgaggatgcctacgccggtcagcactggggctatctgatcgcctacgagcaagacaccgcccgtgccgactcgtgggaagacctgaaagccttcgccagcccggtcagcaacgccctgtagctgcgagttcgcctgggcgcatcacggggctccagcgttgcgggaggtcgagggtgacggcctcgccggtgatgaacacgaatccgagcctgccatcggtgagcatgcagccgccctccagcatggcaaggaagtccgggatgtggagcgcaagctgggtcggcgattcggtcaggagcttgtcgatcgccgtgtggagcgtcgatgggcgtcgccgcgcacccgttgactgcaggctgtccacggcctggtcaaccgccgtgctgttgcgcccagcgagcacctgcaacgcctcggccatcttcaccagcagcacctcctggtagaggtggctggtggtgcaggtgccgcgcttgacgtagttcgtggggcactcccacacgtcgacccggttcggggtaccggagtgccaggtcttgtggccgaacggccgtccgcagtcgccgcagacgatcttgcgggacaggcgcttgccgaaggacttgtagccgcgtgggtcgacgcgggtgcccagccacggcaactcgcggtctgcaatgccgagagcctcggcggcgtggcgttgggcgtggaatgcgtccatccactcgacggtgtacccggcggcgagattttcgaggaggaagctggtcagccggtaggtcagtcgggcttgtactgttgcgagttcggggtattgcatggtgggggctcctgtctttgcgtcacgtacatacacgctctgatcagggctaatagcaagtcgtaaacggcgataccttttagcgcttgccgaactatttggcgctccgttgtcagcctcgacgcacgtggttcacgccgccccacagcgcctctcggacaagccagccaccggagccgatccgtccgaatatgcggctcgacggtcaacactaaggcgcgttttacctagtggggagcgggtttcgccccatctgcgtcatccgcgcaccacaaacccctgtatccacttcgatacagtctgc

SEQ ID NO: 71 - DNA, 7797 bp, Propionibacterium acnes
ggtggtgccgaagaagaaggaatggccccaccaatctgctggtcggtagaagtacggggtttgagccagtcgagtagtttcataatctgctccttgcaaggtattgtgaaggatatgaaatctcttacccctcatttgcttctctgctcttttttcacaagcattgctcctgccttaggagaaggatttcgcaacaaacgtgtggctttcattccgacagcagcagcccacgaggagtacacagcctacgtggattcagcacgctcatcatggaaagaacttggcagcaatatcaccgatgtggatattgccagaatgcctctaagaacagcgaccgaggcgcttgagcaagccgagataatctatctttcaggagggaactccttctacctcctcgattgcctacgctcaacagaaatcgaccagattattcgagggcgtctggccgaaggggcgattctagttggtgaatcagctggagctatagtttgtagcccaaatatcgcctacattcagccaatggatcgtgtccctgacaactacagccaggctgactacaccggactgaacttagtggacttcttcccggtacctcactacctcgcccctccatttgtgaagagttccaaggaagtagtcgcccagcacgctagcctcccactcgagctcatgaacaacgcagaagcggtaatagtagagggtccccaaaggacaaagatctcatcagagcaccagtagtcctcgtgagtcgtacaccgacgtgcccgtgtggctgccaccgcctcggatagcgcggtcgagggccatgatggtggcgaccacctcgtcgatcttctcggtggacttttgcttgtcgggtttgatgtttcctgccgggtcggtgcggacgtgaatgttgtcgaccatccaggacagcactgggtgcctgccgtgagcgagcctaccttctagtgcgagtctcatgagctccttggacggtgggctcatgtctttgaagccttgcccgaagggcacgacggtgaacccggcatcgtcaaggttttggctcatctggactgcgccccacctgtcgaaggcgatctcgcggatatcgaagcgtgtcccgagttgctcgatgtggcgttcgacgtgggcgtattggacgacgttgccctccgtggtctctaataagccctgttggtgccacaggtcgtagggcacatgataacgcgccacccgcaacgccaggttgtcctccggtatccagaaccacggggcgatccggtacttcttcgtccccgtagggtgggaagatgaggacgaaggcggtaatatccgtcgtagaggcaagatccagcccgccgtagcagcgtcttccttccagctcgtccaggtttaccgggtcggctcccgcgtcccagatgtgcatgggcatccaccgcaccgactgcttgacccactggttcaacctgagctgccggaacgtgttctcctcggcagggttctgccgggccgagttgcacgccgcgcgcaccttgtcgatcggcaccgtcacgcccagtgaggggttggctttgcgccacacggcctcatcggtccaatcatcatccgcgtcggccccgtagatcaccgcatagaacgtcggatcatacttcttgcccgcgaggatgtcctggactttctggtgctgctcatagcaaatcgaatgcgtatcagttccggcggtggtgatcaggaaatacagcggctaggtgcgtgcgtcgcccgaacccttggtcatgacgtcgaacagggctcggttgggttgggtgtgaagctcgtcgaagaccacgccggagatgtcgaacccgtgcttgaagtaggcctctgcggagaggacttggtagaaggagttggtgggcttgtagatgattcgcttctgcgaagagaggatcttcacccgcttcgacagggctggtgattggcgcaccatatcggcggcgacttcgaacacgatcgaggcctgccgccggtcggccgcacacccgtagacttcggcacgctcctcaccatccccacacgtcagcagcagggcgacggcggcggcaagctctgatttgccctgcttcttggggatctcgacataggcggtagtgaactggcggtagccgtcggctttgacggtgccgaacaggtcacggatgatttgttcctgccagtcgatgagctggaagggctgtcctgaccagcggcccttggtgtgtttcaaggcttggatgaacgcgaccgcgaagtcggctttccgcttgtcataggtggagcctgcggccatgaaccgggtcggcgtgtaggtgtcgagagtgcgcatcacgcccgtcaggctccttcctgtgctggttagttggtgtgggcgaaggcccaggcgatggcgtggccggcgtcagcgaacagttcgtcagcctcggcgaccaggtcgagttcgcattcactgaagcctcgggcgtcctgtccccagccggagatcggctgctcggcgagcttgtagacgcgggcgtcgtttccgatccggcctttgcccaagtgccggtaggccgaggcgaggacgaagtccccgtaggcgatcaccgtgccgtagctgtcggtcgccatctgcagctgctccatcgtggtcttttcgttgttcatgaccttctccttcttgccttgttcggtcatgtacatacagccataggtgcgcgctcttatccagtcgtaaaagccctagtcagcccactatttttgaggaatctttgaggggcgacgggcacggaaacggcccctgattgggtgggtacccacggtggcttggggtcagtcgatggccaggtgccaggcggggatcatgcggcgttccccggtgatcgggtctgggtagcggtcgttgacttgggtcatgcctcgcagggttgcccctgcctgggtgaggttccagatgatcgtggtcaggccggtctggttcgcgctgatcgtgaactcgccgatgctgtgctccttgagttcgtcgaggatgctgggcacgtctgagtcgtagagaccttcggcgaagtcgagcagctcgttgcccgcccgctggctgttcatgtagacggtgagcaggctcgtggacgaggtttgggtgcgggtcgcgatcttgctggtcgaggtcgtcaattgtgttcatcgcgggtgtccttgtgggtgggtggggtgcgccaggcggcgttgccgtccaagtgtttgagcaaggtgcggcggacgggtttggtgtcgtcgccgatcagaccgaggcgcagcagccagcagcgcatcgcatatttgtcgttcccgcccgtttcggcaggtttggctgaggctcttgtggcggttttggcgtggtcgatgatccgggcgatcagcaccgtggtggcctccactacctgcgggtcgggcgctacgtcgaaccaggggaactcgaccgtcccggcctcggcgtcgatgctcatcggggttgcggggatctggagtgctttggcgatgagctctcctttcgctgctagcgtcgcctccaccttccctttcgtggtgtcctcccaaccggtggtggggaacgccaacgtcaaccccaactcgcctggctcgtcggtggtgtccgtcgggaatccggcctgcgcggccgcctcgaccagcccggccacgtcggtgtcctcgggcagatgcagcagccagtcacgatccaacatggcctcgccaatctggtaggcaaacgttggggttcccagatactcgacggtcgctcgcagctgggtggcgagaaaagcggcgagttgcttgcggcctttgcgctgcttggtgaacttgagtgtcgtcatgaccggcctcctttgcgtgttcccctggtcggagtggttttcggtcatgtacatacacgctctatcccgaccagatagcaagtccggacggccacctatttcttgcctcgatccacggccttcaccacatccaggtaggccaactgttggccgtcgcgcaggcaggtgatacctgcggcgtccccggtggcgtcggcgtagcggcgcagaatgactgaggcgtatttctcgtcgagctccatgcagtaagcgatccggttggtggcctcacacgccatgagcgtggagccagagccggcgaacgtgtcgagcacgatcgcattcgcctgggtggagtttccaatcggatacgccaacagatccagcggcttcgaggtcggatgatcagcattcctgcgaggcttatcaaaccgccagacggtggtttgtttccgatccgcgtaccacgtgtgcttgcccgtcttcacccagccgtagagaacgggctcgtgttgccactgatacggggaacgacccagcaccagggagtccttgacccagatgcaacaccccgacagcttgaagcccgcgtcttgaaaggcgcgccggaagttcagaccttcggtatcggcgtggaacacgtacgcggacgcgcccttctcacacacgcccgccatctgagtgaacgctgcgagcaggaactcgtagaacgcgtccgcgctcatcttgtcgttcttgatcgacaagccgtcagacgattcgaaggcgacgttgtatggcgggtccgtgagcaccaagttggccttcttgccatccatcaacagctcgatgtcgcccgcgttggtggcgtcgccgcacaccagccgatgcctacccaccgtccagatatcaccccgctcgacgaacgcggcagcctccagggcggcggtcagatcgaagtcgtcatcctccacctcgtcctcatccaaggagccgatgagctgggcaatctcatcgtcgtcgaacccagtcagctcagcgtcgaaatcactcgcgtccaggtcggcgatgagcagggcgagcttgtcctggtcccagtcgccactgatcttgttgagcgcgacgttcaaggctttttcgcgggtctcgtccaactcgacgaccacgcagtcgacagtggtttcaccgaggtcttcgaggactttgaggcgctggtggccgccgacgacatggccggtggtcttgttccagatgacaggttcgacgtatccgaactccgtcagcgaccgcttgagcttttcgtagtcggggtcgccgggccggaggtctttgcgcgggttgtagtcggctggcgtgaggtcagcgatgggtagctgctcgatgcgcacggggctccaccgccttccgcaggtcgcgctcaaaacgccaggtttgttcccagcgcggccaatcccggcccatgtgcccgtagaccgcgagatcccggtaacggggtgtgcgcaggttgaggacgtcgatgatccccgccggccgcagcacgaacacgtcacgtgcggcggcggtcaagatgtggtcggcgtactcgccggtgccgagcgtgtccacctcgaacgcgaccggatcagccttcccaatcgcatacgagatgcccacctcgcactcagcggccagcccggcgtcaacgatcgtacgagcgatcaggcgagccatgtaggccgctgaccggtcgaccttggatgggtccttgccggagaacgcgcccccaccatgagacccgagcccgccgtaggtgccgaccatgagcttccggcccgtcagcccggtatcggctcgcggcccgccctcaacgaaccgacccgacggattcacaagaatttcggtgtgctcgtctatgggtaggtaggtctggcaggccggggccacaatcagcgagcgcacctcacgctccaacacggccagatccttgcccgcctcatgctgcaccgagaccacgacggtctcgacggcggcgggggcaccggtgtcgtcataacgcacactcacctgggccttgccgtccgacttgatcccgcagatcgtcccctcgacctgggcagtatcgagacgctcgcagatgcgatgtgccaggacgagcgggagcgggaggcgttcaggggtctcggcggtggcgtaaccgtagaccgtgccctgatcgccagccccctgcaacgcgaacgccgaactatcaccaccgcgtgcctccagcgaggtggtgaccccggcgttgatgtcgctcgattggcggcgcgtccacacgtagatcaggatcccgagcggactgtatccggcacgcgcgagggcggtgcgcacagactcccggatacgcgggcggtggttggtggtgatttcgccggtgacgatgatccgccgaccggctgccatcacctccaccgccacccgtgcggccttgtcgtcgtagaggatgtcgtcgaggatctggtcggcgatctgatcggccaacttgtccggatgaccagcacacacagactcggcagtacgaatcgaacacataagcacactcgcttccacgaatcggaggggaacaagaaagcgtccaccccactagagggtggacgcgaagatcatgaggggcggttaggagcgggcgttgagcagctgctccatcacctcgtcgccgggcgtggtgcccgcgtagtcggtggtgcaggtggcgcgcacgatctcgtaaatctcgtaccaatacacattcgcctgcttcccgaaactctgggacatggcgacaaacgggctggcgatggcggcaccggtggtggggtgcttgccgagcaggccgaacttggagatcgcctgctcgcactgcacataccgggcaaacgcctgcgcatacgcctcaatcaggcgaggcgccacgaattgggaaccgccacgttgatcgagccactgccacgtctcccgatagacgaggtcagcgccaagcggtttgccgtcacgctgaatctccgacagatagtccgatggttcgggcatcgtctccccggcaagcaccgcaccgtcgccaatgtcattacctgcgaagtcgaagggttcgttgagcgggtcttccaggcgggtggcggggcgtccggcggcgagtttctcgcccagcgggccgggcttcgcgcctgcacgcacgcggcgtccgcccctgttggtgccgtctttggccatgggtcgcctccccgccgtagaatcgtcatggtttcggtgctgaagtccacgggaggtgtgagtggttgagtctttaaaactattcgttcggacctacgtgtattgggtagggctcatccttggcttcgcgatagtgcccggttctctgctcttcactgctgaagtcgccccggtgaacactccattgtggcttgcacctttcgccgggctgctgctttttgtcattgatcggccatcaacatgggagccgccgctctggcgagcattactgatccgagtattgggtgcaggatttgcagccaccatgctcatcgcgtttgatgcagttgcttccacccactatggatctcaacactggagtgagacgctcctatctttcggtctcggttggattgtcttcacggtagtggcaggacacatgctcatgagcagctccgcccgatttggcacacctgctcacacgatcagggacgcgatccgtacctacacgacatggataggaatctgcttcgggattttctatatccccgccgcgggactctccgcagctggcactcttttgatggttcttccgctttatggaacgttcctcgccggcctggttcttttgatagttgacccgccacgacgatggccgcaaccgcgagtgaaggcactgtggatacgactcttgtcaagcgtggcagcagcattactacttgttgtcacgaactcgttctatcgcagtactcgcacacacgagattttcgtcggggactggcaggaaaacctggtcttcttcgtgggtgcttgggcactttatgccgca

SEQ ID NO: 72 - DNA, 18956 bp, Propionibacterium acnes
catcatgccgacgtcaaggatcggcgcggccatccaccgggggacacgctgaggctcgggtgatgagggtcgtaggaatctcgactgttccactgggatccgttccaagggcaagacgggccgcagtttctcccacggcggcgaaatcaagccgcaccgtcgtgagcgctggccgagtggccaccgaatggggatgatcatccatgccgacgaccgagacatcctcgggaactctcaaccccaacctgtcaagccctgttaagaggccgagagccacatcgtcgtttccacataggactgcggtcacctggtgcgctcgtaccgcccgtgcaacgtgcatacccgtctcgactgaccacccagtcgccaatggttcgagcggcgggagacctcgagtagccaggacttcgcgccatcccgcacatcgtggatcagggtgccctgcaggaggaactccgacataggcgatgcggcggtggcccaaacccgccaagtattcggtggccattactgcaccggcatgatcatcgatccacgcccgagaccagggctcgcctccctcgggtttgcctccggcaatggcaactgggagatcgacgggcaacccaggcaggagggccacgctgggggaatcaaattcaaggacgacaaccccgtcggcacgagcgtctaaggcacattgcacggtggaacggcatcgctccggcgaccccgccaatacatgtagggaggtctcggcaccgaggtcgagggctgcgctgagtacccccgagagcgtcgcccagtagccggtgcggccgatgtcggagacgagaacgtgcagccgggcgacgtcagggtcggtgcgccaatatcccagctcggtggccgcggtgaggatctcctcggtggcctgcgggagggcaccttcagcgccattctgacgtgccaaggcacgcgacgccgttgccaacgagacgccggagcgctcggcgacgtcagccaaccgcggaggccaccagggccgcctcaccatggccgggtcacgttccatgcaccggacgataccgggttcacacccctgtcctcggcaagggcgtccgcggaagaccagggcgcgacggggccgcatccgcggctgctgaggtggagcgagccggggtggacggaacgggaatcgacgtcgccgatgggccgggaagaggcgaggggatcgtcgtggtgagcgtccagaccgctgccgtggccaaatccgagccctcgaccacccggctgtcagctacgacgatcggcaggccggtgaactttgagtgcagggtacgccccgccccgtttgcaagcaggtgccagcggttgaggctgccctcagtatccgacgtcgtccgacgaccggacccgacgacgacctcgtgcttcccaacctcggcgtcgagaccaaggaccgcgccgccaggagtcgaaaggctgtaagtgcaatcgtcgtgccgaaccacacaccaagtctgaggctgcgcctgcagggtagggacaccgtcgtgaaatgccaagaatcgcccgtccgcgctagtcagccggtagtcgccgggctccagtgccgggttgggggcgtaccaagcgcgcacgtagtcgatgtcaaaactcgccgggagtcgatggacgactggggcccccaggtgtccctcaagactgagcaccatatgccgcgacatccgccacagcgaagggtcgccgggttttgtttcccaggccaggtgtcggtcgaaataaaatcggagttgaccgtcgcggcgttcgacgccatacgtgtggtagtcccgcgaaatgtcgacgccaaccgggtaggcgtggcctccgaagcgccggtgcgtgacctctgtgttatcgggccacacgtgggtcgcgatgttcatcttcgtgtagtcaaaagtctcctcgacgtcaagctccgggtttggctcggcgccggtaagcaaggaagggccaccgtcgagggcggacgactgcatccagatggccgacagcacccgggcggccgagggcaacgccttggcacgcacctcgacgtaggtgcacagacccggcacgtcaaagactgactcaacggcgccaaacgtgtaggaaaaactatcgacctgctcggcacgagcagccaaatggagttgcccgcctgagaaagacacattcgcgtctcgaaagaggccacttcccgagtgtgggtaccacaggccgcgatgccactgggccgagctgtgagtcggatcggtgaattcgtctccaacacccaggagggtccagccagcaaggtcgatatcggcatcggcggcgatagcccgatcgtggtcggcaaccaccggaacggccgccgtgagaacggcagctccgaggactgatctacgtgtgatcagtgtcatgtgtgctcctttgcaacaacgtcactccctaactggggttccatgcagcctacgacgaatgactgcggtcaccacgagcgcgtgaaaacggcctttcatgcgctgtggacggcccctttcccggcacctagggtgaacgacatcacgaacgacggccaatgtcggccagccaggagttcaccaccatgcacgatgtcacccctgtcatccagccgtttcggctcgcgacggcccccgaccaaccggtcggcttggcagccgggactcttgacggcgcggtggcgcttcccctcgtcgaatgcctcaccctcgaacacggccgatgcttcgtcgaccatcgcctcacccaaactacggtgggatccggtctgcgtcccgttcgccgcgaaccgctcacctcgccgtggcccggcacccgcgtcatccagcatgatcgaggatccgacctcaccgtcaccgtcgatctgtggcatcccacctcagcgacaccttgcacgggcgaacaaccgtacataatgacggcaagctcccagtccatctcactgccgtctctatcatgtgcgccagtctgctgtcaggagccgaactcgatgacctcgatatactcatcgcacccagcgcatggatggccgaacaacggtggacccatcaccgcctgtccgatcttctggtggacgtcggcaccgaattgcatggagaatccccgcgcgaccgcttcgtcctatcctcagagtccggttggtcttcaggacgttgggaaccggtcggcttcattaccgacccggcctctggacgcgccgtcggctggcagatcgagcacaacggtggctggactgtcgaattagcccggcgctcttcaaccctcggcctctgcctcttcgggccgaccgaccttcagcaccactggatgcaccagctcaaccctggcgagactttcactacccccgcggtgacgttagtggtatccgataacagctggcagggcgcggcagccgaactaagcacctaccgccgtgtattgaggggcaacaatggcacagcagctccgatcgtcttcaacgactacatgaacaccctcatggccgaccctacggccgagcgactctcgaccctcatcccggccgcagctcgcaccggagccgaggtgtactgcatcgacgccggatggcactccgacgacacagactggtgggacgacgtcggccgctgggagccctcgccccgccgatttcccggcgggctgcgccacacccttgatctcatcgtcgcctacggcatgacgcccggcctgtggattgagccgctggcggttggtctgcgcagtcctctcgtcaatgatctacccccggaggctttcatgcgccgcgcaggggttccgatcgtcgaacagaatcgggtgcgtctagatatgcgcaatccgcaagctcgcgctcatctagataccgtcatcgaccggatggtcagttacggcatcggctacctcaaaattgatgacaatttctctgtcggttctggccccgacgaggacgcggattctcctggggacggtttgctggggcactgccgcgcttgggccgcctggcttgccgacctccctcgacgtcaccctggacttgtcgttgagaactgtgcatctgggggcatgaccaccgactacgccctgttggcccgagcagccatccagtcgacatcagacctccaggattcggtgcgttacccgcccatcgccgccaattcaccgatgacgattttgcccgaacaagccgccaattgggcttacccacagccagacatggacgacgaggaaatcgtctttaccgtcacgacctccttggccggcaccttttacttgtccggtcatgtcgaccgcatgaacgcccaccagatggctctcgtgcaatccggcgcagaggtagccaaggccttacggtcagatctgaccagccaaataccgtggtggccgaaaggccttgccggctgggacgacgagtgggtcgtcaccgggcgtcgaaaaaagtcctctcgcgacggggtgatcattgtctggcaccgtcctagcaccgaatcgacggttctcgacttacctgacctggctgggacccacctcgaacccctttacccacctgcctccctggtccccgacccaggaattcacattgctgactcatcgggttcacctcggctgagttgtccgtctcccaaaccaaccggccgggtcttccgcgtccgggaccttcacgattgcgtcaccgatgtcgcagaaatggagaagaaatgaatcgcaccctcaaggtcgccgcagtaggagccatcgcgatattgtgcctcgctgcctgctccgacccaggctcagactcggcgcaatcctcaggaccggagtcatggccgtcagcaaccaccaatctcaacggtgtggagttgacaatgtgggccgcccagtcgtcggcgtcgatccctcaacaggtcgccgtggacttcaacaaggctaccggggccaagatcaagatcgtcacgatccccgacccctacgagcagagcgtccagaccaaagtcgccaccggtgacgtccctgacctggccatgtggcagccaacgacgtcaatgctcacgagcctgggagccaaagagcatctgcaggtgctcgacgatgccccgtgggagtcgaagactgacaagaacgtcctggctgccggtggttctctcgacgggcaccgctacgccgccttcgtctcagccccctcggtcatgggcgtttggtacaacaaagaagttttcgccaagaacggcatccaggtgccgaagaatttcgacgagatgctcaccattgccaagaagctcaaggctgccggccagaccccgttctacgagatgggcggagagtggtgggcctcccagtgggcggtccaggtgcaggtggccgacgccgccaaggccggtctgtgggacaaggtcaacaagaacgaggacaagttcaccggcactgagatccaaggtgctatcaacacctacgacaccatgatcaaggaaggtctgttcaattcggacatcacaaccggaactttcaacgaccaagccaaggcgctgcttgacgggaaagcagcgatggccattcaagtaacgagcctattgggcaacatggccgcccgagccgacaccgccactctcgacaagaagatcgggttcttccccatctctaagtcgggcaccgtggcaacgtcgatccccgaccagaccaacgccgtggtcgccttcaaatcgaaggatgccaagaaggagactgcgacacgtcagttcatcacctactggttgtccaacgactacgcgtccttcgtcaaggtacaaaacaccgtttccatcattaacggtgttaaaacgcccgattccgtgcccaaagccctcatcgactcgaacgccaccctcaaaggttcggtcggctcgatgcagtctctggctgtcgccaaccccgacttagctaagaacctcggtgacatgatcgctggcacgaagactccagcacaggtgggctcagagactcagtctcagttcgcccagctcgccaaggcgattggcgcgaaagggttctgatccatatgtcctcgatggaagccgcaccgcgacacggcagtgcaaaccagtcgcatccctggggattcgttgtacccgcgttcgccgtgctcgcggtgttcttcctcacgccaacgatctacaacttcatctacgccttcaccgactggtcgagcttcaaaacggccatcaatccggtgggatggagcaatttctccgatctcatcgcatcaggaagcctgcggaaatccttgactatcacccttatttacgcggctggcgtggccacgctgcagaatctgttcggactgatgctggccgtactgttggagcgcgacaccctcgtcaacaagatcgtccgggtgatcttttttatccctgtgatcctctcggcgctagcgactggttacatcttccaagcgttgctgcgccccgacggcgggctcaaccaaatgctcggaatattcacgggatctccggtaaaagtctcctggctgggatcgacgacgtggactctgctcgtgtgcattgtcattcactcgtggaagtggatgggcatgtcgatgctcgtgtacctggccgggcttaagacgatcgatgcccaagtgctcgaggcggcacgcatcgacggggcgtcacggtgggcgaccttccaccagatccgcttgcctctcatcgccccagcggtgacgttcaacgtcgccaccgccttgctggggtcgatgaactccttcgatatcgtccaggcgactacgggcggaggccccggcggctccaccgaactgcttaacctcttcatcttccgaactttcggccagggcctctacgctcaggcgacgacgatgagcctggtgctcttcgtggccgtcgtcatcttggcattccccgtgatcgggatgcttcgtcgccgtgagggaaggatgtcatgaccaaacgcatcattcagccaattggcgcggtactgctagccgtgctcgtcgtcgggatacccctgtggacggtcgtcgtcactgcagggaagtcccaggccgaagcactcatcccggacatatcattgccacaccactggcaactgtggaccaacgtctccactgtcaccagccagacaaggatcggctgggcatatctgggctcgttgttcctgctggtgccctcggtggtcatcgtcttgatcatcggatcgatggcatcgtgggttttagctcggcgcacaggcaagctcgtctccgtgatctacgcgctggggatttcgggcatcatcctgccgccagcggtcgtcaccttggtgttactgctgcgtcagctgggattggctggccgccccatcggaatgatctgcgcctatgtcgggatgtacctgtcgacggtgattttcttcgtcactggattcgtccgcacgatacccgagtccctcgaggaggcggcccgaatcgatggagctggaccaatgcgcgtctttgtgacggtcatcctccccttgctgcgtccagtgctggcaactgcgacgattctcatcagcctgtacgtgtggaacgacgtcttctatgccttcttcgtcgtaggaggccggatggacaccttgccgctgaacttgtttacagtcgccagcgccggggtacacctcaataactggcatctcatcttcacctatgtgctgctcatgagcgtgccgatcgtgatgctgttcattgcattccagcgcagcattatttcaggcattacttcgggtgcggtcaagtaacccttcttactgcctggggccttcgatcggactggcgaaatctccacaacgctcaactggtagtgacagtgaggtctggatcctgcatgtcttcgtcgaaggggaagatcggacgacgcagatggttatggcccagacgcataaggtcctggtccacaccgccaggggtgagcgccatgatccaatcggcggccaagtcgtaaaggtccggctcgagatacccgatcttcaccacgactatgtcggtcgtccgagggtccagttgtacccgctcaaactgttccagggtcgtgtactgatcgcgccgagtcgtcacgatgacgctaagccccccgattcccagcactgccgtacgcaggccgccaggatcgtcaactaggcagcgcacctgggcactcaggtggatagggccaggcttgcgagtatcgacatgtccccctaaatccacctcaaccatgcccccgacgcccgcttcgtcagcacgtttcacgacctgtgggtcatagatggaagcatgaatcgcggagagctccccaccagtgatctcgggatgggccagcaatacagatagcgcaatcgtcacgtcatcagcaccgccagcgcccggattgtcccccgagtcggaaataacgaacggccgtcgcgaggacgccaccgccctgtctaccgcttgttcgatcccatcggtgggagcgacgaagacgaattcgcgacgcaccttccagaagaactgtgcaatctcgctcaccccgtcgcgtacgtggttctcgtcgtcaccgaacccgacgacggctgccgtgcatcgaggctggtcggcccaagcaaagccgatccacaccccaacatcggtaacaccgtcgtgagccgccacctcgggcaccatgtcgtagagcgaagccgccggttcgatcctggtggacgtcttttcaccgggtaacagaatcggcacggtgaccatcgccttgatcggtttgcccttcccggaacgcagtcgctcgcacaatgtccgagccgctctctcccgtgacacccacgcgtcctcgtgcggtgccatccgatagcaggtgagcaggtcgcagcccgcgaagagtttttcagagacgtttccgtgcaggtccatcgaggcactcaccattggctcgggaccaaccacgtcgcggatggcgctgatgagatctccctcaacgtcgtcgtagcccggcacgctcatggctccgtgaatgtcgaagaagatcccgtccacatgaccggccttcgccaggccgtcgcagatttcggcgcgccacttctcgtaggtcagacgttccacgggtcctcccggcagggctgagcagtgcaggatcggtacccactcaacgtcatggttccacggacgttttgtcggcacatcccactcctcgcctgcgatggcccggggcacctggtctatgccggggatcggggactcggtgatccacgggtatcgctccagcagtgtctggccgcgacgctgcgtgaagtcagcggccgtgctcatgtagggggtgaaagtactcgattcaatatgaagtccacaaatggctatacgtatcatcagcgattgccttcctgtgagatgggcatatgagagtcaagtatcgacatgccgatgagcggggcatcggctccgcaagcagaggtctcgatcacgagatcctcggtgcacatgggcaaacagcgctcgtacagttcactgcgtacgccagcgagcaaagaacccatctgcgacattgagccgcccaacacgatgcgaaccgggttgaggaagttaacaaggttggaaagcacctcaccaagacgcattccggcgtcacgcactaaggaaaccgcctggggatcgccgctgttctcggcagtcaccaactgtgaggttgtggaaatggacgagcccaaacggcccagctgccgtaggatcgcagcccccgatgccaccgtctccaaacacccggagttaccacaggtacacggtagggggttatcggtatgcacccgcagatgggtgatgtcgccagcaagaccgcgtgagcctcggtaagcgaccccgccgctgacccaaccagcacctatgccggtgccagctttaacgtagatgcaggagtcccggtgccgtccgcggcagttccactccccgattgtcgcggcacgagcgtcattctcgataactgatggcaccgcgagttcctgtgccaacatgccggcgatgtctttgccactccacccaggcatccgcgctgccccaacgacgtgaccactaccgtccaccgggccgggtaccgccaagccggctgaaaccaccgctccagggatctcgtcaccaagcttgtgccaccccttggccaaggctttgatcgtcttctccggaccgatctctatgtttatcttgatgtcgtcggtagcgagtagctcgccctcccgagacgctattgccaaccgggcatgatgctggccaagttctgcaacaaaggcattgccgactgctggtgcaacgcgcaatttagtgggacgacgaccaccggtggaatctgcgcacgcgtactcttcaacgactcgcgactcgagcaggtgtcgcaccgccgcgctcaccgtggaacgtggcatggaagtgctctcggcgatctcggcgcgagtcatacccggcgtttttcgaagaatcttgatgactcgctgcccaggcgcgctgcccagctgatcgtcagtgtgcccattcatgcccgtcgcgccaaggttggtgagctcaatatctgtcatcagcttcctcaatccgtcatcgtgcctgcccgacgtctcggcccacagtatgcccgcgtccggagatatgtgtagcaaaagtgataaaagctagattattttacattcgaagcatccgaagtcatcaccttgcgctactcttacggtagtaagggttcatcccaccaggcaacggaggctgagggaactcatgaagaaaccacgaaagagactgcttgtggtgaccgcagcagtggcagcaactctgttggttgcctcgtgctcgtatggcagtggcgaccccagtcgatctcaggcaagcggcggcgcgcaggacggcaacgtatccttcgcgaccaccacgcccaactggatcctcccggtgtccgcacccggaaagacgcagggtgagaacgccatgttcacccagctcatttaccccgccttgttctcctacaagctcgacgcgaagaacgagttcaacattgatgaacgccactcggtggccaaacctcccaccgtgtccgacgactcactcacctacaccatcacccttaaggaccgcacatggagcgacggcgtcaagctcactacgcgcgacatggagttctggtggaacatcgtcaccaacaacaccgacaagtgggcgtcctaccgcaaaggccagttccccgacaacgtcaaggctttcaagatcattgacgacaaggccttcaccatcaccacgactgagaagtacaacccggcatggttcatcaacaaccaactgaaccgccttgtgccaatgccagcccacgcctggtctaagaccagcgactccgacaagcccggtgagaaggaccgcacccctgccggagccaaggcaatcttcaaatacttgagcgccgcctcggaggacttacagaactacgacaccaacaaactctggaagacgactctcgggcccttccagctcggcaagtacaccccgaacggtaaggccaagctcgtcgccagtcctagctacgacggtgaagacaaggcgagcatttcgagcttcaccatgcagccgtacaccagtgacgacgctgagttcaacatcctgcgctccggaagcatcgactacggcttcatcccacccaactcgatgacccagcaaaagtacatcgagaaacagggctacaccgtcaaaccgtggtacggctggtcgatcacctacatgccgtttaacttcaacaacccgaagtccggcccgatattcgcccaaaaatatatccgtcaggcgatgcaacacctcattgatcaggaaggaatctccaagatcatctggaaccggactgcatcccccacctgcggcccggtaccccagcaacctggcaccgccggtagctccaaaggttgcgcctacgactacaaccctgcgaaagctgagaaactcctcaaagaccacggttggaatgtcactaaggacggaatcaccacctgtcaacaagccggggagggcgaaggccaatgcggcaaaggaatcaagcagggggccaagctttccttcaccgtgatctcccaatccggtttcacctcgaccacccacatgttcgccgaactcaagtcgagtttttccaacgtcggtatcaacttggagattcgagaggttcctgactcggtggctgagtcccaagcctgtaagcccaacgacacgaactgcaagtgggacctgtcattctttggttcgcagtcatcgtggtactacccggtctacgcgtccggtgagcggctcttccaaagcggtggcccggtaaacctgggcagctactccgacaagaaagccgacgagcttattgacgcgtccatgcgttcgaacgatcggacagccctcaaaacgtacaacgcctatctggctgaagacctgccggtgttatggatgccgaacccggtcaatcgcgtctcagcatggaaatccaacatccaaggaatcgatccacaggaccccatgctgtacctgtacccgcaggactggaccatcagatgacctcacgcagagtgagcccacgttactgaccccgcccgtttcacacggcgtcaccgggtcgccccggtgacgccaccccaacgtcccaatcacccatctcaggagggagcaaaggatgacgcgatacatcgcgcaacgcgtttttcaagcgctgatagtgctgttgctcgtcacgcttatcactttctccatccttcacgcacttccaggcggagcagctcgctcggctttgggactggacgccacccaagcgcagatcgacgcatacaaccatcagatgggttacgaccaacccttatggaagcagtacttcggctatctgatccagatcttccatggcgaattcggacactctttccgactcaacatgccggttgccgacgcgatcggtcagcggcttcctaagacgattgtcctcagtctcatgtcggcagtcgtcgccatcctcctcgcgatccctatcggcgctatccaagccgtcaagcgcaaccgcacggctgactacactctcaccgtcatcgccatgctggcatattccacaccattgttcttcctgggcctcgttctcatcatcctcttctcacaggtgtggccgatcttcccaccagaagcgccacaagggttcagcgtcggagaagttcttagccaagggcgatcgctcgtgctgcccaccacgacgctcgccatcgtcacgctggccgtgtacgcgcgctacatgcgttcctcgatgattgacaacctcgaggaaaactacatccgcaccgcccgcagtaagggaatcaccgagacaagagtcgtcatcgttcatgccctgcgcaactcgctgtttccgatcatcaccctactcggcatgcagttgccggccttgttctccggtgcgctggtagtggagtcgctgttcaactaccccggcatgggtctgttgttctggcaggcggcccagttccgcgactaccccatcctgctagcagtcaccatcatcatctcaatggccaccgtgctcggcgccctcatcgcagacatcctctatgccgtcgtcgatccgcggattcgttacggaggagcagaccgatgagcaccgagatcgctattcccgatcctcagagccgacgtcccgaatctgcccgtcccatgcgtcccggcacagcgcgacggaccagcagacgcaccagcctcttcaaacagggggtggaggtgttcttcgagaaccgtttggccgtcgtaggatttgtcaccctgcttatcatcgtcgttctgtgcttcatcggaccgtcgatctggcgcaccgatcaggtccacacccagctgtccagcgcttacctccccatctccggcacgcaccctcttggtacggacgcggtgggctacgaccagctcggacgactcatgctcggcggccagacatccatcatcgtcggcctggcagctggcatcctggccaccaccatcggaacgatttggggcgccacagccggattcgtcggaggatggttagacgctgcgatgatgcgaatcgttgactcactcatggctatcccggccttgttcctcttcatgctcatcgccacgctcgtcacaccgaccgtgcccttgttggtactcatcattggcgcatttgcttggctcaacccagctcggctcatccgcggtgagtcgctggctctgcgcagccgggaatacatcgtcgctatgcgtggcatgggcggtagctctctgcgcgccgtacgcactcacgttgtgcgtaatgccatcggcaccgtcatcgtcaatgcaaccttccaggtggcagacgccatcctctacgtcgcgtacctgtcatttctcggcctcggggttcccccaccagcggccaattggggcggcatgctttccgacgggctcgccgaggtctactcgggtcactggtggctgttatacccgcccggggtactcatcatcattctggttgtcgcgtttaacttcgtcggtgacggattacgggacgccttcgaggttcggctgaggagtagatgacatgagcatgtcacagcccgaagacatcttgctgcgtctgcaagatctggaggtcactattgacgtgcgcggtggcagggtcgcgcctttgcggggctgctccatggaagtacgacgcggcgagacgatcggtctagtcggcgagtccggatccggtaagacgatgacagcgctatccatcatgggcctgctcccccacggtggacgggttaccggaggatccatcgtcttcaacggcagggacctcactagttcgccacccgacgagacccggcgcattcgcggtatggacatcgggatgatcttccaagacccgctcacctcactcaacccgacgatgaaaatcggtaaccaagtaggcgaagcgctgagaatccacaaggtggcctcgaagaagaaggcttgggaacgctctatcgacctcctgcgcaaggtgggaatgccacgtccggaaaagatcgtcaatgactatccgcatcagctgtctggtggtatgcgtcagcgagtcatgatcgctatggcactcatctgctcacccagtcttctgatcgcggatgagccgacgacagctttggatgtaacgactcagcggcagatcctcgacctcattgacgacctcaagaaggagttcaacaccgccgtcatcctggtgacacacgatctgggagtagttgcgggccgggccgaccgggtagccgtcatgtatgcgggtcagatcgtcgaggtggcatcgtctaccgacattttcatcaacccccagcaccagtacacgcgctcgctcattgccgcactgcctgagcagaccaccgatacccgtgaggagctctacaccatccctgggatgccgccggacctgcgcgagaagatcgtcggctgcgccttcgctactcgttgcccgctggccactgagatctgcactcagtccaaccctcacatggtcaccctgggcagaaccgacgcgccaagtgccaacaacgaacccgccaaccatgtacatacctgcttccatccggcagggccgccgctgaagcgccgacacgacctacgcccggagcgagacctgtccagccaccccgttgtgtgctcagtgcaagatctccataaaaactaccctgccatgagcagcggcgtcatccggcgtcaaatcgggtgggtacgggccgtcagcggtgtcagctttgacgtctatgagggcgagacactggggatcgtcggtgaatccggttgtggtaaatcgaccttagggcgcgtcatcactgcgttggaaccagcgacctcaggctccgtgtgcatcaatggcaaggatattgctcaggcgtcacgcagggaacgcaccctcttgcaccgcaatgtacagatgatgtttcaggattcctacgccgcaatggatccgcgcatgcgagtagacgagatcctctccgagccccttagcatccaaaaaatcggagaccggcgttcgcgtgccgacgctgcggacaatctcatcgacaagatcgggctgtccgataacgccttgtcgaagtacccgcatcagttctctggtggccaattgcagcggatcggccttgcgcggtcactgatgctagaaccccatctcattgtctgtgatgagccagtcagtgccttggatgtatccgtccaggctcaagtgctcaatctcatgcgcaggctccagcaggagcagaacctcacctacatcttcatctcccacgacttgtctgtcgtcaggtacatgtcggatcgaattgccgtgatgtacttaggaaaaatcgtggaaataggtgaggctaacaaggtcgtcgaccacccacgtcacccgtatacgcgggcactgatcgaggcgatccccgttgctgaccccgcgcatcacgtggaggagatcgtgcgtctgcagggtgaaccagccagtgccatcgacacgcctccggggtgccgtttcaaaaatcgatgcccatttgccaccaacaagtgcgccgaagaacccccgttagtgggcgacactcaccgagtggcctgccacttccctctaccacacgacgtcttggaagtatcatgagccaccccggcgcctatcgaccggtcgtcgccatcgatattggcggcacaacgatgactattgccgaagtccgttccgacggaagcgtacgagatccggtgacaatggacagccccgcacgaatccatggcgacgaagtggtggcccgaatatgcgagcttgtcgagacccgctggccccatccgtgccggatcggcatagggaccgcaggagtcgtcgaccctatcagtggctcgatcggcagagcatccgactccttccaagggtggaccgggtacccactacgcgaacgtctggaagaggcccttggcgtggcggtccaagtggaaaacgacgtcaatgccttcctcgttggcgagcaacggttcggcgcagcggccggggagcgcgactgccttgggatcatgcttggtaccggtgtcggcggagccgtcatcctcgacggacaggtgattcatggtcggcgcggggccgcagccgaaatcggtcatatgcctgcgctaggaaacgatcgatgcagttgtggcgtccccggacacctcgagtcactcgctgggggaagggccatcgcccgacgctgggctgcggccactggacgggatcccaaatccgtcaatggcgcccgtgaggttgcccgccgggcggcaaacggcgatgctgtggcgccgcgaatactcgccgaagctggaaaagccctaggaatcgcactagtacaagccgcgaccctgtttgatctgagtacggtcatcgtcggaggaagcgtcgcaagggcatggcagtggctctcgcccggcctgcacgacgtcgtgacggcgtacccgttgatctccggggctgaattgcgggtgcgtcttgcctcgcttagcgaccgcgcggtcctcataggcgcagccagtcttggggtctgcgacgatcaatggacgaagccatgctgaacttcgacgaacgcaccggcccgaatcagggagtgaacgccccgcactggccgtcggtccaggtgcctcaatggtggaaagatgccaaactcggattcttcatccactggggcttgtactcggttcccgcctgggcgaccaccaatcccgacccggtaccacttgagcaggagtacgcccaccactgctacgccgagtggtatgcaaacacggtgcgcatcctcaactctcccactcgccgacatcacgacagggtatacgggatcggaacgagctatgaggacttcgccgactggtggagccccgacctagatgcacctgccacgctgatccgtcgaattgctgacgccggggccgggtacgtcatcccgacgacgaaacaccatgacggattctgtctgtggcataccgacacgaccggcttcaatgccgctaaacgaggaccgcaccaagatctcgtcaaggccttgcacgacgaggcgcgagcggcaggacttagattcggcgtctactattcgggagcgctcgactggcatgttggggacttcggggcgatcacctctgataccgagctgttcaccttccgccgcaacgaccccgacttcgccaaatactgcgccgctcaactcactgaacttatcgcacggttccgaccagacatattgtggaatgacattgagtggcccgatgcgggcaaggggagtcagccctacgggctcgccagcctgttcagccactacctgaagcaagtacctgagggggtcgtcaacgaccgctggggagtatcccaccacggattcctcactcgggagtaccgtcatgttgacgccaaaatcaacgaaccgtgggagtcgacgcgggggctcggacgttcttttggctacaaccaagaagagtcgacagacgagagccttagtggcaccgagctcgtccagtacctcgtggatgtcgtcgctaaaaacggaaatctgctcattaacgtcgggccacgcgctgacgggtctattcctgaggtgcaggccgctgcaatggccgaactcggacggtggatgagggtgcacgatgaagccattcggggtacccgaccctggggaaacggggtctacggtgaccagcgcatcgtcaagcgtggggaaactgtctacgtccatctgctcgacggggacgcgctccacctccctgacgagctccagggcttcgatgtcagctggatcggcagccagagcaagcagacctctgtgccatgcgagctcgttaaccagccggtcaaggtcgcgaggctcacccggtgaggatggatcccagtcatgtagtaaacaccgaccgcgataggacctcttagttgtgagggggatgggaccggcagagctatctcagtgaagcgattcccgggaggtcaccacacccggagcgcatcccgttcgtccatacgcagcggttgcagctttgagggcgtgtcctccgaggtccaatcgttgcgaccacgtacttatgcataaggtcg

SEQ ID NO: 73 - DNA, 18954 bp, Propionibacterium acnes
catcatgccgacgtcaaggatcggcgcggccatccaccgggggacacgctgaggctcgggtgatgagggtcgtaggaatctcgactgttccactgggatccgttccaagggcaagacgggccgcagtttctcccacggcggcgaaatcaagccgcaccgtcgtgagcgctggccgagtggccaccgaatggggatgatcatccatgccgacgaccgagacatcctcgggaactctcaaccccaacctgtcaagccctgttaagaggccgagagccacatcgtcgtttccacataggactgcggtcacctggtgcgctcgtaccgcccgtgcaacgtgcatacccgtctcgactgaccacccagtcgccaatggttcgagcggcgggagacctcgagtagccaggacttcgcgccatcccgcacatcgtggatcagggtgccctgcaggaggaactccgacataggcgatgcggcggtggcccaaacccgccaagtattcggtggccattactgcaccggcatgatcatcgatccacgcccgagaccagggctcgcctccctcgggtttgcctccggcaatggcaactgggagatcgacgggcaacccaggcaggagggccacgctgggggaatcaaattcaaggacgacaaccccgtcggcacgagcgtctaaggcacattgcacggtggaacggcatcgctccggcgaccccgccaatacatgtagggaggtctcggcaccgaggtcgagggctgcgctgagtacccccgagagcgtcgcccagtagccggtgcggccgatgtcggagacgagaacgtgcagccgggcgacgtcagggtcggtgcgccaatatcccagctcggtggccgcggtgaggatctcctcggtggcctgcgggagggcaccttcagcgccattctgacgtgccaaggcacgcgacgccgttgccaacgagacgccggagcgctcggcgacgtcagccaaccgcggaggccaccagggccgcctcaccatggccgggtcacgttccatgcaccggacgataccgggttcacacccctgtcctcggcaagggcgtccgcggaagaccagggcgcgacggggccgcatccgcggctgctgaggtggagcgagccggggtggacggaacgggaatcgacgtcgccgatgggccgggaagaggcgaggggatcgtcgtggtgagcgtccagaccgctgccgtggccaaatccgagccctcgaccacccggctgtcagctacgacgatcggcaggccggtgaactttgagtgcagggtacgccccgccccgtttgcaagcaggtgccagcggttgaggctgccctcagtatccgacgtcgtccgacgaccggacccgacgacgacctcgtgcttcccaacctcggcgtcgagaccaaggaccgcgccgccaggagtcgaaaggctgtaagtgcaatcgtcgtgccgaaccacacaccaagtctgaggctgcgcctgcagggtagggacaccgtcgtgaaatgccaagaatcgcccgtccgcgctagtcagccggtagtcgccgggctccagtgccgggttgggggcgtaccaagcgcgcacgtagtcgatgtcaaaactcgccgggagtcgatggacgactggggcccccaggtgtccctcaagactgagcaccatatgccgcgacatccgccacagcgaagggtcgccgggttttgtttcccaggccaggtgtcggtcgaaataaaatcggagttgaccgtcgcggcgttcgacgccatacgtgtggtagtcccgcgaaatgtcgacgccaaccgggtaggcgtggcctccgaagcgccggtgcgtgacctctgtgttatcgggccacacgtgggtcgcgatgttcatcttcgtgtagtcaaaagtctcctcgacgtcaagctccgggtttggctcggcgccggtaagcaaggaagggccaccgtcgagggcggacgactgcatccagatggccgacagcacccgggcggccgagggcaacgccttggcacgcacctcgacgtaggtgcacagacccggcacgtcaaagactgactcaacggcgccaaacgtgtaggaaaaactatcgacctgctcggcacgagcagccaaatggagttgcccgcctgagaaagacacattcgcgtctcgaaagaggccacttcccgagtgtgggtaccacaggccgcgatgccactgggccgagctgtgagtcggatcggtgaattcgtctccaacacccaggagggtccagccagcaaggtcgatatcggcatcggcggcgatagcccgatcgtggtcggcaaccaccggaacggccgccgtgagaacggcagctccgaggactgatctacgtgtgatcagtgtcatgtgtgctcctttgcaacaacgtcactccctaactggggttccatgcagcctacgacgaatgactgcggtcaccacgagcgcgtgaaaacggcctttcatgcgctgtggacggcccctttcccggcacctagggtgaacgacatcacgaacgacggccaatgtcggccagccaggagttcaccaccatgcacgatgtcacccctgtcatccagccgtttcggctcgcgacggcccccgaccaaccggtcggcttggcagccgggactcttgacggcgcggtggcgcttcccctcgtcgaatgcctcaccctcgaacacggccgatgcttcgtcgaccatcgcctcacccaaactacggtgggatccggtctgcgtcccgttcgccgcgaaccgctcacctcgccgtggcccggcacccgcgtcatccagcatgatcgaggatccgacctcaccgtcaccgtcgatctgtggcatcccacctcagcgaccttgcacgggcgaacaaccgtacataatgacggcaagctcccagtccatctcactgccgtctctatcatgtgcgccagtctgctgtcaggagccgaattcgatgacctcgatatactcatcgcacccagcgcatggatggccgaacaacggtggacccatcaccgcctgtccgatcttctggtggacgtcggcaccgaattgcatggagaatccccgcgcgaccgcttcgtcctatcctcagagtccggttggtcttcaggacgttgggaaccggtcggcttcattaccgacccggcctctggacgcgccgtcggctggcagatcgagcacaacggtggctggactgtcgaattagcccggcgctcttcaaccctcggcctctgcctcttcgggccgaccgaccttcagcaccactggatgcaccagctcaaccctggcgagactttcactacccccgcggtgacgttagtggtatccgataacagctggcagggcgcggcagccgaactaagcacctaccgccgtgtattgaggggcaacaatggcacagcagctccgatcgtcttcaacgactacatgaacaccctcatggccgaccctacggccgagcgactctcgaccctcatcccggccgcagctcgcaccggagccgaggtgtactgcatcgacgccggatggcactccgacgacacagactggtgggacgacgtcggccgctgggagccctcgccccgccgatttcccggcgggctgcgccacacccttgatctcatcgtcgcctacggcatgacgcccggcctgtggattgagccgctggcggttggtctgcgcagtcctctcgtcaatgatctacccccggaggctttcatgcgccgcgcaggggttccgatcgtcgaacagaatcgggtgcgtctagatatgcgcaatccgcaagctcgcgctcatctagataccgtcatcgaccggatggtcagttacggcatcggctacctcaaaattgatgacaatttctctgtcggttctggccccgacgaggacgcggattctcctggggacggtttgctggggcactgccgcgcttgggccgcctggcttgccgacctccctcgacgtcaccctggacttgtcgttgagaactgtgcatctgggggcatgaccaccgactacgccctgttggcccgagcagccatccagtcgacatcagacctccaggattcggtgcgttacccgcccatcgccgccaattcaccgatgacgattttgcccgaacaagccgccaattgggcttacccacagccagacatggacgacgaggaaatcgtctttaccgtcacgacctccttggccggcaccttttacttgtccggtcatgtcgaccgcatgaacgcccaccagatggctctcgtgcaatccggcgcagaggtagccaaggccttacggtcagatctgaccagccaaataccgtggtggccgaaaggccttgccggctgggacgacgagtgggtcgtcaccgggcgtcgaaaaaagtcctctcgcgacggggtgatcattgtctggcaccgtcctagcaccgaatcgacggttctcgacttacctgacctggctgggacccacctcgaacccctttacccacctgcctccctggtccccgacccaggaattcacattgctgactcatcgggttcacctcggctgagttgtccgtctcccaaaccaaccggccgggtcttccgcgtccgggaccttcacgattgcgtcaccgatgtcgcagaaatggagaagaaatgaatcgcaccctcaaggtcgccgcagtaggagccatcgcgatattgtgcctcgctgcctgctccgacccaggctcagactcggcgcaatcctcaggaccggagtcatggccgtcagcaaccaccaatctcaacggtgtggagttgacaatgtgggccgcccagtcgtcggcgtcgatccctcaacaggtcgccgtggacttcaacaaggctaccggggccaagatcaagatcgtcacgatccccgacccctacgagcagagcgtccagaccaaagtcgccaccggtgacgtccctgacctggccatgtggcagccaacgacgtcaatgctcacgagcctgggagccaaagagcatctgcaggtgctcgacgatgccccgtgggagtcgaagactgacaagaacgtcctggctgccggtggttctctcgacgggcaccgctacgccgccttcgtctcagccccctcggtcatgggcgtttggtacaacaaagaagttttcgccaagaacggcatccaggtgccgaagaatttcgacgagatgctcaccattgccaagaagctcaaggctgccggccagaccccgttctacgagatgggcggagagtggtgggcctcccagtgggcggtccaggtgcaggtggccgacgccgccaaggccggtctgtgggacaaggtcaacaagaacgaggacaagttcaccggcactgagatccaaggtgctatcaacacctacgacaccatgatcaaggaaggtctgttcaattcggacatcacaaccggaactttcaacgaccaagccaaggcgctgcttgacgggaaagcagcgatggccattcaagtaacgagcctattgggcaacatggccgcccgagccgacaccgccactctcgacaagaagatcgggttcttccccatctctaagtcgggcaccgtggcaacgtcgatccccgaccagaccaacgccgtggtcgccttcaaatcgaaggatgccaagaaggagactgcgacacgtcagttcatcacctactggttgtccaacgactacgcgtccttcgtcaaggtacaaaacaccgtttccatcattaacggtgttaaaacgcccgattccgtgcccaaagccctcatcgactcgaacgccaccctcaaaggttcggtcggctcgatgcagtctctggctgtcgccaaccccgacttagctaagaacctcggtgacatgatcgctggcacgaagactccagcacaggtgggctcagagactcagtctcagttcgcccagctcgccaaggcgattggcgcgaaagggttctgatccatatgtcctcgatggaagccgcaccgcgacacggcagtgcaaaccagtcgcatccctggggattcgttgtacccgcgttcgccgtgctcgcggtgttcttcctcacgccaacgatctacaacttcatctacgccttcaccgactggtcgagcttcaaaacggccatcaatccggtgggatggagcaatttctccgatctcatcgcatcaggaagcctgcggaaatccttgactatcacccttatttacgcggctggcgtggccacgctgcagaatctgttcggactgatgctggccgtactgttggagcgcgacaccctcgtcaacaagatcgtccgggtgatcttttttatccctgtgatcctctcggcgctagcgactggttacatcttccaagcgttgctgcgccccgacggcgggctcaaccaaatgctcggaatattcacgggatctccggtaaaagtctcctggctgggatcgacgacgtggactctgctcgtgtgcattgtcattcactcgtggaagtggatgggcatgtcgatgctcgtgtacctggccgggcttaagacgatcgatgcccaagtgctcgaggcggcacgcatcgacggggcgtcacggtgggcgaccttccaccagatccgcttgcctctcatcgccccagcggtgacgttcaacgtcgccaccgccttgctggggtcgatgaactccttcgatatcgtccaggcgactacgggcggaggccccggcggctccaccgaactgcttaacctcttcatcttccgaactttcggccagggcctctacgctcaggcgacgacgatgagcctggtgctcttcgtggccgtcgtcatcttggcattccccgtgatcgggatgcttcgtcgccgtgagggaaggatgtcatgaccaaacgcatcattcagccaattggcgcggtactgctagccgtgctcgtcgtcgggatacccctgtggacggtcgtcgtcactgcagggaagtcccaggccgaagcactcatcccggacatatcattgccacaccactggcaactgtggaccaacgtctccactgtcaccagccagacaaggatcggctgggcatatctgggctcgttgttcctgctggtgccctcggtggtcatcgtcttgatcatcggatcgatggcatcgtgggttttagctcggcgcacaggcaagctcgtctccgtgatctacgcgctggggacttcgggcatcatcctgccgccagcggtcgtcaccttggtgttactgctgcgtcagctgggattggctggccgccccatcggaatgatctgcgcctatgtcgggatgtacctgtcgacggtgattttcttcgtcactggattcgtccgcacgatacccgagtccctcgaggaggcggcccgaatcgatggagctggaccaatgcgcgtctttgtgacggtcatcctccccttgctgcgtccagtgctggcaactgcgacgattctcatcagcctgtacgtgtggaacgacgtcttctatgccttcttcgtcgtaggaggccggatggacaccttgccgctgaacttgtttacagtcgccagcgccggggtacacctcaataactggcatctcatcttcacctatgtgctgctcatgagcgtgccgatcgtgatgctgttcattgcattccagcgcagcattatttcaggcattacttcgggtgcggtcaagtaacccttcttactgcctggggccttcgatcggactggcgaaatctccacaacgctcaactggtagtgacagtgaggtctggatcctgcatgtcttcgtcgaaggggaagatcggacgacgcagatggttatggcccagacgcataaggtcctggtccacaccgccaggggtgagcgccatgatccaatcggcggccaagtcgtaaaggtccggctcgagatacccgatcttcaccacgactatgtcggtcgtccgagggtccagttgtacccgctcaaactgttccagggtcgtgtactgatcgcgccgagtcgtcacgatgacgctaagccccccgattcccagcactgccgtacgcaggccgccaggatcgtcaactaggcagcgcacctgggcactcaggtggatagggccaggcttgcgagtatcgacatgtccccctaaatccacctcaaccatgcccccgacgcccgcttcgtcagcacgtttcacgacctgtgggtcatagatggaagcatgaatcgcggagagctccccaccagtgatctcgggatgggccagcaatacagatagcgcaatcgtcacgtcatcagcaccgccagcgcccggattgtcccccgagtcggaaataacgaacggccgtcgcgaggacgccaccgccctgtctaccgcttgttcgatcccatcggtgggagcgacgaagacgaattcgcgacgcaccttccagaagaactgtgcaatctcgctcaccccgtcgcgtacgtggttctcgtcgtcaccgaacccgacgacggctgccgtgcatcgaggctggtcggcccaagcaaagccgatccacaccccaacatcggtaacaccgtcgtgagccgccacctcgggcaccatgtcgtagagcgaagccgccggttcgatcctggtggacgtcttttcaccgggtaacagaatcggcacggtgaccatcgccttgatcggtttgcccttcccggaacgcagtcgctcgcacaatgtccgagccgctctctcccgtgacacccacgcgtcctcgtgcggtgccatccgatagcaggtgagcaggtcgcagcccgcgaagagtttttcagagacgtttccgtgcaggtccatcgaggcactcaccattggctcgggaccaaccacgtcgcggatggcgctgatgagatctccctcaacgtcgtcgtagcccggcacgctcatggctccgtgaatgtcgaagaagatcccgtccacatgaccggccttcgccaggccgtcgcagatttcggcgcgccacttctcgtaggtcagacgttccacgggtcctcccggcagggctgagcagtgcaggatcggtacccactcaacgtcatggttccacggacgttttgtcggcacatcccactcctcgcctgcgatggcccggggcacctggtctatgccggggatcggggactcggtgatccacgggtatcgctccagcagtgtctggccgcgacgctgcgtgaagtcagcggccgtgctcatgtagggggtgaaagtactcgattcaatatgaagtccacaaatggctatacgtatcatcagcgattgccttcctgtgagatgggcatatgagagtcaagtatcgacatgccgatgagcggggcatcggctccgcaagcagaggtctcgatcacgagatcctcggtgcacatgggcaaacagcgctcgtacagttcactgcgtacgccagcgagcaaagaacccatctgcgacattgagccgcccaacacgatgcgaaccgggttgaggaagttaacaaggttggaaagcacctcaccaagacgcattccggcgtcacgcactaaggaaaccgcctggggatcgccgctgttctcggcagtcaccaactgtgaggttgtggaaatggacgagcccaaacggcccagctgccgtaggatcgcagcccccgatgccaccgtctccaaacacccggagttaccacaggtacacggtagggggttatcggtatgcacccgcagatgggtgatgtcgccagcaagaccgcgtgagcctcggtaagcgaccccgccgctgacccaaccagcacctatgccggtgccagctttaacgtagatgcaggagtcccggtgccgtccgcggcagttccactccccgattgtcgcggcacgagcgtcattctcgataactgatggcaccgcgagttcctgtgccaacatgccggcgatgtctttgccactccacccaggcatccgcgctgccccaacgacgtgaccactaccgtccaccgggccgggtaccgccaagccggctgaaaccaccgctccagggatctcgtcaccaagcttgtgccaccccttggccaaggctttgatcgtcttctccggaccgatctctatgtttatcttgatgtcgtcggtagcgagtagctcgccctcccgagacgctattgccaaccgggcatgatgctggccaagttctgcaacaaaggcattgccgactgctggtgcaacgcgcaatttagtgggacgacgaccaccggtggaatctgcgcacgcgtactcttcaacgactcgcgactcgagcaggtgtcgcaccgccgcgctcaccgtggaacgtggcatggaagtgctctcggcgatctcggcgcgagtcatacccggcgtttttcgaagaatcttgatgactcgctgcccaggcgcgctgcccagctgatcgtcagtgtgcccattcatgcccgtcgcgccaaggttggtgagctcaatatctgtcatcagcttcctcaatccgtcatcgtgcctgcccgacgtctcggcccacagtatgcccgcgtccggagatatgtgtagcaaaagtgataaaagctagattattttacattcgaagcatccgaagtcatcaccttgcgctactcttacggtagtaagggttcatcccaccaggcaacggaggctgagggaactcatgaagaaaccacgaaagagactgcttgtggtgaccgcagcagtggcagcaactctgttggttgcctcgtgctcgtatggcagtggcgaccccagtcgatctcaggcaagcggcggcgcgcaggacggcaacgtatccttcgcgaccaccacgcccaactggatcctcccggtgtccgcacccggaaagacgcagggtgagaacgccatgttcacccagctcatttaccccgccttgttctcctacaagctcgacgcgaagaacgagttcaacattgatgaacgccactcggtggccaaacctcccaccgtgtccgacgactcactcacctacaccatcacccttaaggaccgcacatggagcgacggcgtcaagctcactacgcgcgacatggagttctggtggaacatcgtcaccaacaacaccgacaagtgggcgtcctaccgcaaaggccagttccccgacaacgtcaaggctttcaagatcattgacgacaaggccttcaccatcaccacgactgagaagtacaacccggcatggttcatcaacaaccaactgaaccgccttgtgccaatgccagcccacgcctggtctaagaccagcgactccgacaagcccggtgagaaggaccgcacccctgccggagccaaggcaatcttcaaatacttgagcgccgcctcggaggacttacagaactacgacaccaacaaactctggaagacgactctcgggcccttccagctcggcaagtacaccccgaacggtaaggccaagctcgtcgccagtcctagctacgacggtgaagacaaggcgagcatttcgagcttcaccatgcagccgtacaccagtgacgacgctgagttcaacatcctgcgctccggaagcatcgactacggcttcatcccacccaactcgatgacccagcaaaagtacatcgagaaacagggctacaccgtcaaaccgtggtacggctggtcgatcacctacatgccgtttaacttcaacaacccgaagtccggcccgatattcgcccaaaaatatatccgtcaggcgatgcaacacctcattgatcaggaaggaatctccaagatcatctggaaccggactgcatcccccacctgcggcccggtaccccagcaacctggcaccgccggtagctccaaaggttgcgcctacgactacaaccctgcgaaagctgagaaactcctcaaagaccacggttggaatgtcactaaggacggaatcaccacctgtcaacaagccggggagggcgaaggccaatgcggcaaaggaatcaagcagggggccaagctttccttcaccgtgatctcccaatccggtttcacctcgaccacccacatgttcgccgaactcaagtcgagtttttccaacgtcggtatcaacttggagattcgagaggttcctgactcggtggctgagtcccaagcctgtaagcccaacgacacgaactgcaagtgggacctgtcattctttggttcgcagtcatcgtggtactacccggtctacgcgtccggtgagcggctcttccaaagcggtggcccggtaaacctgggcagctactccgacaagaaagccgacgagcttattgacgcgtccatgcgttcgaacgatcggacagccctcaaaacgtacaacgcctatctggctgaagacctgccggtgttatggatgccgaacccggtcaatcgcgtctcagcatggaaatccaacatccaaggaatcgatccacaggaccccatgctgtacctgtacccgcaggactggaccatcagatgacctcacgcagagtgagcccacgttactgaccccgcccgtttcacacggcgtcaccgggtcgccccggtgacgccaccccaacgtcccaatcacccatctcaggagggagcaaaggatgacgcgatacatcgcgcaacgcgtttttcaagcgctgatagtgctgttgctcgtcacgcttatcactttctccatccttcacgcacttccaggcggagcagctcgctcggctttgggactggacgccacccaagcgcagatcgacgcatacaaccatcagatgggttacgaccaacccttatggaagcagtacttcggctatctgatccagatcttccatggcgaattcggacactctttccgactcaacatgccggttgccgacgcgatcggtcagcggcttcctaagacgattgtcctcagtctcatgtcggcagtcgtcgccatcctcctcgcgatccctatcggcgctatccaagccgtcaagcgcaaccgcacggctgactacactctcaccgtcatcgccatgctggcatattccacaccattgttcttcctgggcctcgttctcatcatcctcttctcacaggtgtggccgatcttcccaccagaagcgccacaagggttcagcgtcggagaagttcttagccaagggcgatcgctcgtgctgcccaccacgacgctcgccatcgtcacgctggccgtgtacgcgcgctacatgcgttcctcgatgattgacaacctcgaggaaaactacatccgcaccgcccgcagtaagggaatcaccgagacaagagtcgtcatcgttcatgccctgcgcaactcgctgtttccgatcatcaccctactcggcatgcagttgccggccttgttctccggtgcgctggtagtggagtcgctgttcaactaccccggcatgggtctgttgttctggcaggcggcccagttccgcgactaccccatcctgctagcagtcaccatcatcatctcaatggccaccgtgctcggcgccctcatcgcagacatcctctatgccgtcgtcgatccgcggattcgttacggaggagcagaccgatgagcaccgagatcgctattcccgatcctcagagccgacgtcccgaatctgcccgtcccatgcgtcccggcacagcgcgacggaccagcagacgcaccagcctcttcaaacagggggtggaggtgttcttcgagaaccgtttggccgtcgtaggatttgtcaccctgcttatcatcgtcgttctgtgcttcatcggaccgtcgatctggcgcaccgatcaggtccacacccagctgtccagcgcttacctccccatctccggcacgcaccctcttggtacggacgcggtgggctacgaccagctcggacgactcatgctcggcggccagacatccatcatcgtcggcctggcagctggcatcctggccaccaccatcggaacgatttggggcgccacagccggattcgtcggaggatggttagacgctgcgatgatgcgaatcgttgactcactcatggctatcccggccttgttcctcttcatgctcatcgccacgctcgtcacaccgaccgtgcccttgttggtactcatcattggcgcatttgcttggctcaacccagctcggctcatccgcggtgagtcgctggctctgcgcagccgggaatacatcgtcgctatgcgtggcatgggcggtagctctctgcgcgccgtacgcactcacgttgtgcgtaatgccatcggcaccgtcatcgtcaatgcaaccttccaggtggcagacgccatcctctacgtcgcgtacctgtcatttctcggcctcggggttcccccaccagcggccaattggggcggcatgctttccgacgggctcgccgaggtctactcgggtcactggtggctgttatacccgcccggggtactcatcatcattctggttgtcgcgtttaacttcgtcggtgacggattacgggacgccttcgaggttcggctgaggagtagatgacatgagcatgtcacagcccgaagacatcttgctgcgtctgcaagatctggaggtcactattgacgtgcgcggtggcagggtcgcgcctttgcggggctgctccatggaagtacgacgcggcgagacgatcggtctagtcggcgagtccggatccggtaagacgatgacagcgctatccatcatgggcctgctcccccacggtggacgggttaccggaggatccatcgtcttcaacggcagggacctcactagttcgccacccgacgagacccggcgcattcgcggtatggacatcgggatgatcttccaagacccgctcacctcactcaacccgacgatgaaaatcggtaaccaagtaggcgaagcgctgagaatccacaaggtggcctcgaagaagaaggcttgggaacgctctatcgacctcctgcgcaaggtgggaatgccacgtccggaaaagatcgtcaatgactatccgcatcagctgtctggtggtatgcgtcagcgagtcatgatcgctatggcactcatctgctcacccagtcttctgatcgcggatgagccgacgacagctttggatgtaacgactcagcggcagatcctcgacctcattgacgacctcaagaaggagttcaacaccgccgtcatcctggtgacacacgatctgggagtagttgcgggccgggccgaccgggtagccgtcatgtatgcgggtcagatcgtcgaggtggcatcgtctaccgacattttcatcaacccccagcaccagtacacgcgctcgctcattgccgcactgcctgagcagaccaccgatacccgtgaggagctctacaccatccctgggatgccgccggacctgcgcgagaagatcgtcggctgcgccttcgctactcgttgcccgctggccactgagatctgcactcagtccaaccctcacatggtcaccctgggcagaaccgacgcgccaagtgccaacaacgaacccgccaaccatgtacatacctgcttccatccggcagggccgccgctgaagcgccgacacgacctacgcccggagcgagacctgtccagccaccccgttgtgtgctcagtgcaagatctccataaaaactaccctgccatgagcagcggcgtcatccggcgtcaaatcgggtgggtacgggccgtcagcggtgtcagctttgacgtctatgagggcgagacactggggatcgtcggtgaatccggttgtggtaaatcgaccttagggcgcgtcatcactgcgttggaaccagcgacctcaggctccgtgtgcatcaatggcaaggatattgctcaggcgtcacgcagggaacgcaccctcttgcaccgcaatgtacagatgatgtttcaggattcctacgccgcaatggatccgcgcatgcgagtagacgagatcctctccgagccccttagcatccaaaaaatcggagaccggcgttcgcgtgccgacgctgcggacaatctcatcgacaagatcgggctgtccgataacgccttgtcgaagtacccgcatcagttctctggtggccaattgcagcggatcggccttgcgcggtcactgatgctagaaccccatctcattgtctgtgatgagccagtcagtgccttggatgtatccgtccaggctcaagtgctcaatctcatgcgcaggctccagcaggagcagaacctcacctacatcttcatctcccacgacttgtctgtcgtcaggtacatgtcggatcgaattgccgtgatgtacttaggaaaaatcgtggaaataggtgaggctaacaaggtcgtcgaccacccacgtcacccgtatacgcgggcactgatcgaggcgatccccgttgctgaccccgcgcatcacgtggaggagatcgtgcgtctgcagggtgaaccagccagtgccatcgacacgcctccggggtgccgtttcaaaaatcgatgcccatttgccaccaacaagtgcgccgaagaacccccgttagtgggcgacactcaccgagtggcctgccacttccctctaccacacgacgtcttggaagtatcatgagccaccccggcgcctatcgaccggtcgtcgccatcgatattggcggcacaacgatgactattgccgaagtccgttccgacggaagcgtacgagatccggtgacaatggacagccccgcacgaatccatggcgacgaagtggtggcccgaatatgcgagcttgtcgagacccgctggccccatccgtgccggatcggcatagggaccgcaggagtcgtcgaccctatcagtggctcgatcggcagagcatccgactccttccaagggtggaccgggtacccactacgcgaacgtctggaagaggcccttggcgtggcggtccaagtggaaaacgacgtcaatgccttcctcgttggcgagcaacggttcggcgcagcggccggggagcgcgactgccttgggatcatgcttggtaccggtgtcggcggagccgtcatcctcgacggacaggtgattcatggtcggcgcggggccgcagccgaaatcggtcatatgcctgcgctaggaaacgatcgatgcagttgtggcgtccccggacacctcgagtcactcgctgggggaagggccatcgcccgacgctgggctgcggccactggacgggatcccaaatccgtcaatggcgcccgtgaggttgcccgccgggcggcaaacggcgatgctgtggcgccgcgaatactcgccgaagctggaaaagccctaggaatcgcactagtacaagccgcgaccctgtttgatctgagtacggtcatcgtcggaggaagcgtcgcaagggcatggcagtggctctcgcccggcctgcacgacgtcgtgacggcgtacccgttgatctccggggctgaattgcgggtgcgtcttgcctcgcttagcgaccgcgcggtcctcataggcgcagccagtcttggggtctgcgacgatcaatggacgaagccatgctgaacttcgacgaacgcaccggcccgaatcagggagtgaacgccccgcactggccgtcggtccaggtgcctcaatggtggaaagatgccaaactcggattcttcatccactggggcttgtactcggttcccgcctgggcgaccaccaatcccgacccggtaccacttgagcaggagtacgcccaccactgctacgccgagtggtatgcaaacacggtgcgcatcctcaactctcccactcgccgacatcacgacagggtatacgggatcggaacgagctatgaggacttcgccgactggtggagccccgacctagatgcacctgccacgctgatccgtcgaattgctgacgccggggccgggtacgtcatcccgacgacgaaacaccatgacggattctgtctgtggcataccgacacgaccggcttcaatgccgctaaacgaggaccgcaccaagatctcgtcaaggccttgcacgacgaggcgcgagcggcaggacttagattcggcgtctactattcgggagcgctcgactggcatgttggggacttcggggcgatcacctctgataccgagctgttcaccttccgccgcaacgaccccgacttcgccaaatactgcgccgctcaactcactgaacttatcgcacggttccgaccagacatattgtggaatgacattgagtggcccgatgcgggcaaggggagtcagccctacgggctcgccagcctgttcagccactacctgaagcaagtacctgagggggtcgtcaacgaccgctggggagtatcccaccacggattcctcactcgggagtaccgtcatgttgacgccaaaatcaacgaaccgtgggagtcgacgcgggggctcggacgttcttttggctacaaccaagaagagtcgacagacgagagccttagtggcaccgagctcgtccagtacctcgtggatgtcgtcgctaaaaacggaaatctgctcattaacgtcgggccacgcgctgacgggtctattcctgaggtgcaggccgctgcaatggccgaactcggacggtggatgagggtgcacgatgaagccattcggggtacccgaccctggggaaacggggtctacggtgaccagcgcatcgtcaagcgtggggaaactgtctacgtccatctgctcgacggggacgcgctccacctccctgacgagctccagggcttcgatgtcagctggatcggcagccagagcaagcagacctctgtgccatgcgagctcgttaaccagccggtcaaggtcgcgaggctcacccggtgaggatggatcccagtcatgtagtaaacaccgaccgcgataggacctcttagttgtgagggggatgggaccggcagagctatctcagtgaagcgattcccgggaggtcaccacacccggagcgcatcccgttcgtccatacgcagcggttgcagctttgagggcgtgtcctccgaggtccaatcgttgcgaccacgtacttatgcataaggtcg

SEQ ID NO: 74 - DNA, 18955 bp, Propionibacterium acnes
catcatgccgacgtcaaggatcggcgcggccatccaccgggggacacgctgaggctcgggtgatgagggtcgtaggaatctcgactgttccactgggatccgttccaagggcaagacgggccgcagtttctcccacggcggcgaaatcaagccgcaccgtcgtgagcgctggccgagtggccaccgaatggggatgatcatccatgccgacgaccgagacatcctcgggaactctcaaccccaacctgtcaagccctgttaagaggccgagagccacatcgtcgtttccacataggactgcggtcacctggtgcgctcgtaccgcccgtgcaacgtgcatacccgtctcgactgaccacccagtcgccaatggttcgagcggcgggagacctcgagtagccaggacttcgcgccatcccgcacatcgtggatcagggtgccctgcaggaggaactccgacataggcgatgcggcggtggcccaaacccgccaagtattcggtggccattactgcaccggcatgatcatcgatccacgcccgagaccagggctcgcctccctcgggtttgcctccggcaatggcaactgggagatcgacgggcaacccaggcaggagggccacgctgggggaatcaaattcaaggacgacaaccccgtcggcacgagcgtctaaggcacattgcacggtggaacggcatcgctccggcgaccccgccaatacatgtagggaggtctcggcaccgaggtcgagggctgcgctgagtacccccgagagcgtcgcccagtagccggtgcggccgatgtcggagacgagaacgtgcagccgggcgacgtcagggtcggtgcgccaatatcccagctcggtggccgcggtgaggatctcctcggtggcctgcgggagggcaccttcagcgccattctgacgtgccaaggcacgcgacgccgttgccaacgagacgccggagcgctcggcgacgtcagccaaccgcggaggccaccagggccgcctcaccatggccgggtcacgttccatgcaccggacgataccgggttcacacccctgtcctcggcaagggcgtccgcggaagaccagggcgcgacggggccgcatccgcggctgctgaggtggagcgagccggggtggacggaacgggaatcgacgtcgccgataggccgggaagaggcgaggggatcgtcgtggtgagcgtccagaccgctgccgtggccaaatccgagccctcgaccacccggctgtcagctacgacgatcggcaggccggtgaactttgagtgcagggtacgccccgccccgtttgcaagcaggtgccagcggttgaggctgccctcagtatccgacgtcgtccgacgaccggacccgacgacgacctcgtgcttcccaacctcggcgtcgagaccaaggaccgcgccgccaggagtcgaaaggctgtaagtgcaatcgtcgtgccgaaccacacaccaagtctgaggctgcgcctgcagggtagggacaccgtcgtgaaatgccaagaatcgcccgtccgcgctagtcagccggtagtcgccgggctccagtgccgggttgggggcgtaccaagcgcgcacgtagtcgatgtcaaaactcgccgggagtcgatggacgactggggcccccaggtgtccctcaagactgagcaccatatgccgcgacatccgccacagcgaagggtcgccgggttttgtttcccaggccaggtgtcggtcgaaataaaatcggagttgaccgtcgcggcgttcgacgccatacgtgtggtagtcccgcgaaatgtcgacgccaaccgggtaggcgtggcctccgaagcgccggtgcgtgacctctgtgttatcgggccacacgtgggtcgcgatgttcatcttcgtgtagtcaaaagtctcctcgacgtcaagctccgggtttggctcggcgccggtaagcaaggaagggccaccgtcgagggcggacgactgcatccagatggccgacagcacccgggcggccgagggcaacgccttggcacgcacctcgacgtaggtgcacagacccggcacgtcaaagactgactcaacggcgccaaacgtgtaggaaaaactatcgacctgctcggcacgagcagccaaatggagttgcccgcctgagaaagacacattcgcgtctcgaaagaggccacttcccgagtgtgggtaccacaggccgcgatgccactgggccgagctgtgagtcggatcggtgaattcgtctccaacacccaggagggtccagccagcaaggtcgatatcggcatcggcggcgatagcccgatcgtggtcggcaaccaccggaacggccgccgtgagaacggcagctccgaggactgatctacgtgtgatcagtgtcatgtgtgctcctttgcaacaacgtcactccctaactggggttccatgcagcctacgacgaatgactgcggtcaccacgagcgcgtgaaaacggcctttcatgcgctgtggacggcccctttcccggcacctagggtgaacgacatcacgaacgacggccaatgtcggccagccaggagttcaccaccatgcacgatgtcacccctgtcatccagccgtttcggctcgcgacggcccccgaccaaccggtcggcttggcagccgggactcttgacggcgcggtggcgcttcccctcgtcgaatgcctcaccctcgaacacggccgatgcttcgtcgaccatcgcctcacccaaactacggtgggatccggtctgcgtcccgttcgccgcgaaccgctcacctcgccgtggcccggcacccgcgtcatccagcatgatcgaggatccgacctcaccgtcaccgtcgatctgtggcatcccacctcagcgaccttgcacgggcgaacaaccgtacataatgacggcaagctcccagtccatctcactgccgtctctatcatgtgcgccagtctgctgtcaggagccgaactcgatgacctcgatatactcatcgcacccagcgcatggatggccgaacaacggtggacccatcaccgcctgtccgatcttctggtggacgtcggcaccgaattgcatggagaatccccgcgcgaccgcttcgtcctatcctcagagtccggttggtcttcaggacgttgggaaccggtcggcttcattaccgacccggcctctggacgcgccgtcggctggcagatcgagcacaacggtggctggactgtcgaattagcccggcgctcttcaaccctcggcctctgcctcttcgggccgaccgaccttcagcaccactggatgcaccagctcaaccctggcgagactttcactacccccgcggtgacgttagtggtatccgataacagctggcagggcgcggcagccgaactaagcacctaccgccgtgtattgaggggcaacaatggcacagcagctccgatcgtcttcaacgactacatgaacaccctcatggccgaccctacggccgagcgactctcgaccctcatcccggccgcagctcgcaccggagccgaggtgtactgcatcgacgccggatggcactccgacgacacagactggtgggacgacgtcggccgctgggagccctcgccccgccgatttcccggcgggctgcgccacacccttgatctcatcgtcgcctacggcatgacgcccggcctgtggattgagccgctggcggttggtctgcgcagtcctctcgtcaatgatctacccccggaggctttcatgcgccgcgcaggggttccgatcgtcgaacagaatcgggtgcgtctagatatgcgcaatccgcaagctcgcgctcatctagataccgtcatcgaccggatggtcagttacggcatcggctacctcaaaattgatgacaatttctctgtcggttctggccccgacgaggacgcggattctcctggggacggtttgctggggcactgccgcgcttgggccgcctggcttgccgacctccctcgacgtcaccctggacttgtcgttgagaactgtgcatctggggggcatgaccaccgactacgccctgttggcccgagcagccatccagtcgacatcagacctccaggattcggtgcgttacccgcccatcgccgccaattcaccgatgacgattttgcccgaacaagccgccaattgggcttacccacagccagacatggacgacgaggaaatcgtctttaccgtcacgacctccttggccggcaccttttacttgtccggtcatgtcgaccgcatgaacgcccaccagatggctctcgtgcaatccggcgcagaggtagccaaggccttacggtcagatctgaccagccaaataccgtggtggccgaaaggccttgccggctgggacgacgagtgggtcgtcaccgggcgtcgaaaaaagtcctctcgcgacggggtgatcattgtctggcaccgtcctagcaccgaatcgacggttctcgacttacctgacctggctgggacccacctcgaacccctttacccacctgcctccctggtccccgacccaggaattcacattgctgactcatcgggttcacctcggctgagttgtccgtctcccaaaccaaccggccgggtcttccgcgtccgggaccttcacgattgcgtcaccgatgtcgcagaaatggagaagaaatgaatcgcaccctcaaggtcgccgcagtaggagccatcgcgatattgtgcctcgctgcctgctccgacccaggctcagactcggcgcaatcctcaggaccggagtcatggccgtcagcaaccaccaatctcaacggtgtggagttgacaatgtgggccgcccagtcgtcggcgtcgatccctcaacaggtcgccgtggacttcaacaaggctaccggggccaagatcaagatcgtcacgatccccgacccctacgagcagagcgtccagaccaaagtcgccaccggtgacgtccctgacctggccatgtggcagccaacgacgtcaatgctcacgagcctgggagccaaagagcatctgcaggtgctcgacgatgccccgtgggagtcgaagactgacaagaacgtcctggctgccggtggttctctcgacgggcaccgctacgccgccttcgtctcagccccctcggtcatgggcgtttggtacaacaaagaagttttcgccaagaacggcatccaggtgccgaagaatttcgacgagatgctcaccattgccaagaagctcaaggctgccggccagaccccgttctacgagatgggcggagagtggtgggcctcccagtgggcggtccaggtgcaggtggccgacgccgccaaggccggtctgtgggacaaggtcaacaagaacgaggacaagttcaccggcactgagatccaaggtgctatcaacacctacgacaccatgatcaaggaaggtctgttcaattcggacatcacaaccggaactttcaacgaccaagccaaggcgctgcttgacgggaaagcagcgatggccattcaagtaacgagcctattgggcaacatggccgcccgagccgacaccgccactctcgacaagaagatcgggttcttccccatctctaagtcgggcaccgtggcaacgtcgatccccgaccagaccaacgccgtggtcgccttcaaatcgaaggatgccaagaaggagactgcgacacgtcagttcatcacctactggttgtccaacgactacgcgtccttcgtcaaggtacaaaacaccgtttccatcattaacggtgttaaaacgcccgattccgtgcccaaagccctcatcgactcgaacgccaccctcaaaggttcggtcggctcgatgcagtctctggctgtcgccaaccccgacttagctaagaacctcggtgacatgatcgctggcacgaagactccagcacaggtgggctcagagactcagtctcagttcgcccagctcgccaaggcgattggcgcgaaagggttctgatccatatgtcctcgatggaagccgcaccgcgacacggcagtgcaaaccagtcgcatccctggggattcgttgtacccgcgttcgccgtgctcgcggtgttcttcctcacgccaacgatctacaacttcatctacgccttcaccgactggtcgagcttcaaaacggccatcaatccggtgggatggagcaatttctccgatctcatcgcatcaggaagcctgcggaaatccttgactatcacccttatttacgcggctggcgtggccacgctgcagaatctgttcggactgatgctggccgtactgttggagcgcgacaccctcgtcaacaagatcgtccgggtgatcttttttatccctgtgatcctctcggcgctagcgactggttacatcttccaagcgttgctgcgccccgacggcgggctcaaccaaatgctcggaatattcacgggatctccggtaaaagtctcctggctgggatcgacgacgtggactctgctcgtgtgcattgtcattcactcgtggaagtggatgggcatgtcgatgctcgtgtacctggccgggcttaagacgatcgatgcccaagtgctcgaggcggcacgcatcgacggggcgtcacggtgggcgaccttccaccagatccgcttgcctctcatcgccccagcggtgacgttcaacgtcgccaccgccttgctggggtcgatgaactccttcgatatcgtccaggcgactacgggcggaggccccggcggctccaccgaactgcttaacctcttcatcttccgaactttcggccagggcctctacgctcaggcgacgacgatgagcctggtgctcttcgtggccgtcgtcatcttggcattccccgtgatcgggatgcttcgtcgccgtgagggaaggatgtcatgaccaaacgcatcattcagccaattggcgcggtactgctagccgtgctcgtcgtcgggatacccctgtggacggtcgtcgtcactgcagggaagtcccaggccgaagcactcatcccggacatatcattgccacaccactggcaactgtggaccaacgtctccactgtcaccagccagacaaggatcggctgggcatatctgggctcgttgttcctgctggtgccctcggtggtcatcgtcttgatcatcggatcgatggcatcgtgggttttagctcggcgcacaggcaagctcgtctccgtgatctacgcgctggggatttcgggcatcatcctgccgccagcggtcgtcaccttggtgttactgctgcgtcagctgggattggctggccgccccatcggaatgatctgcgcctatgtcgggatgtacctgtcgacggtgattttcttcgtcactggattcgtccgcacgatacccgagtccctcgaggaggcggcccgaatcgatggagctggaccaatgcgcgtctttgtgacggtcatcctccccttgctgcgtccagtgctggcaactgcgacgattctcatcagcctgtacgtgtggaacgacgtcttctatgccttcttcgtcgtaggaggccggatggacaccttgccgctgaacttgtttacagtcgccagcgccggggtacacctcaataactggcatctcatcttcacctatgtgctgctcatgagcgtgccgatcgtgatgctgttcattgcattccagcgcagcattatttcaggcattacttcgggtgcggtcaagtaacccttcttactgcctggggccttcgatcggactggcgaaatctccacaacgctcaactggtagtgacagtgaggtctggatcctgcatgtcttcgtcgaaggggaagatcggacgacgcagatggttatggcccagacgcataaggtcctggtccacaccgccaggggtgagcgccatgatccaatcggcggccaagtcgtaaaggtccggctcgagatacccgatcttcaccacgactatgtcggtcgtccgagggtccagttgtacccgctcaaactgttccagggtcgtgtactgatcgcgccgagtcgtcacgatgacgctaagccccccgattcccagcactgccgtacgcaggccgccaggatcgtcaactaggcagcgcacctgggcactcaggtggatagggccaggcttgcgagtatcgacatgtccccctaaatccacctcaaccatgcccccgacgcccgcttcgtcagcacgtttcacgacctgtgggtcatagatggaagcatgaatcgcggagagctccccaccagtgatctcgggatgggccagcaatacagatagcgcaatcgtcacgtcatcagcaccgccagcgcccggattgtcccccgagtcggaaataacgaacggccgtcgcgaggacgccaccgccctgtctaccgcttgttcgatcccatcggtgggagcgacgaagacgaattcgcgacgcaccttccagaagaactgtgcaatctcgctcaccccgtcgcgtacgtggttctcgtcgtcaccgaacccgacgacggctgccgtgcatcgaggctggtcggcccaagcaaagccgatccacaccccaacatcggtaacaccgtcgtgagccgccacctcgggcaccatgtcgtagagcgaagccgccggttcgatcctggtggacgtcttttcaccgggtaacagaatcggcacggtgaccatcgccttgatcggtttgcccttcccggaacgcagtcgctcgcacaatgtccgagccgctctctcccgtgacacccacgcgtcctcgtgcggtgccatccgatagcaggtgagcaggtcgcagcccgcgaagagtttttcagagacgtttccgtgcaggtccatcgaggcactcaccattggctcgggaccaaccacgtcgcggatggcgctgatgagatctccctcaacgtcgtcgtagcccggcacgctcatggctccgtgaatgtcgaagaagatcccgtccacatgaccggccttcgccaggccgtcgcagatttcggcgcgccacttctcgtaggtcagacgttccacgggtcctcccggcagggctgagcagtgcaggatcggtacccactcaacgtcatggttccacggacgttttgtcggcacatcccactcctcgcctgcgatggcccggggcacctggtctatgccggggatcggggactcggtgatccacgggtatcgctccagcagtgtctggccgcgacgctgcgtgaagtcagcggccgtgctcatgtagggggtgaaagtactcgattcaatatgaagtccacaaatggctatacgtatcatcagcgattgccttcctgtgagatgggcatatgagagtcaagtatcgacatgccgatgagcggggcatcggctccgcaagcagaggtctcgatcacgagatcctcggtgcacatgggcaaacagcgctcgtacagttcactgcgtacgccagcgagcaaagaacccatctgcgacattgagccgcccaacacgatgcgaaccgggttgaggaagttaacaaggttggaaagcacctcaccaagacgcattccggcgtcacgcactaaggaaaccgcctggggatcgccgctgttctcggcagtcaccaactgtgaggttgtggaaatggacgagcccaaacggcccagctgccgtaggatcgcagcccccgatgccaccgtctccaaacacccggagttaccacaggtacacggtagggggttatcggtatgcacccgcagatgggtgatgtcgccagcaagaccgcgtgagcctcggtaagcgaccccgccgctgacccaaccagcacctatgccggtgccagctttaacgtagatgcaggagtcccggtgccgtccgcggcagttccactccccgattgtcgcggcacgagcgtcattctcgataactgatggcaccgcgagttcctgtgccaacatgccggcgatgtctttgccactccacccaggcatccgcgctgccccaacgacgtgaccactaccgtccaccgggccgggtaccgccaagccggctgaaaccaccgctccagggatctcgtcaccaagcttgtgccaccccttggccaaggctttgatcgtcttctccggaccgatctctatgtttatcttgatgtcgtcggtagcgagtagctcgccctcccgagacgctattgccaaccgggcatgatgctggccaagttctgcaacaaaggcattgccgactgctggtgcaacgcgcaatttagtgggacgacgaccaccggtggaatctgcgcacgcgtactcttcaacgactcgcgactcgagcaggtgtcgcaccgccgcgctcaccgtggaacgtggcatggaagtgctctcggcgatctcggcgcgagtcatacccggcgtttttcgaagaatcttgatgactcgctgcccaggcgcgctgcccagctgatcgtcagtgtgcccattcatgcccgtcgcgccaaggttggtgagctcaatatctgtcatcagcttcctcaatccgtcatcgtgcctgcccgacgtctcggcccacagtatgcccgcgtccggagatatgtgtagcaaaagtgataaaagctagattattttacattcgaagcatccgaagtcatcaccttgcgctactcttacggtagtaagggttcatcccaccaggcaacggaggctgagggaactcatgaagaaaccacgaaagagactgcttgtggtgaccgcagcagtggcagcaactctgttggttgcctcgtgctcgtatggcagtggcgaccccagtcgatctcaggcaagcggcggcgcgcaggacggcaacgtatccttcgcgaccaccacgcccaactggatcctcccggtgtccgcacccggaaagacgcagggtgagaacgccatgttcacccagctcatttaccccgccttgttctcctacaagctcgacgcgaagaacgagttcaacattgatgaacgccactcggtggccaaacctcccaccgtgtccgacgactcactcacctacaccatcacccttaaggaccgcacatggagcgacggcgtcaagctcactacgcgcgacatggagttctggtggaacatcgtcaccaacaacaccgacaagtgggcgtcctaccgcaaaggccagttccccgacaacgtcaaggctttcaagatcattgacgacaaggccttcaccatcaccacgactgagaagtacaacccggcatggttcatcaacaaccaactgaaccgccttgtgccaatgccagcccacgcctggtctaagaccagcgactccgacaagcccggtgagaaggaccgcacccctgccggagccaaggcaatcttcaaatacttgagcgccgcctcggaggacttacagaactacgacaccaacaaactctggaagacgactctcgggcccttccagctcggcaagtacaccccgaacggtaaggccaagctcgtcgccagtcctagctacgacggtgaagacaaggcgagcatttcgagcttcaccatgcagccgtacaccagtgacgacgctgagttcaacatcctgcgctccggaagcatcgactacggcttcatcccacccaactcgatgacccagcaaaagtacatcgagaaacagggctacaccgtcaaaccgtggtacggctggtcgatcacctacatgccgtttaacttcaacaacccgaagtccggcccgatattcgcccaaaaatatatccgtcaggcgatgcaacacctcattgatcaggaaggaatctccaagatcatctggaaccggactgcatcccccacctgcggcccggtaccccagcaacctggcaccgccggtagctccaaaggttgcgcctacgactacaaccctgcgaaagctgagaaactcctcaaagaccacggttggaatgtcactaaggacggaatcaccacctgtcaacaagccggggagggcgaaggccaatgcggcaaaggaatcaagcagggggccaagctttccttcaccgtgatctcccaatccggtttcacctcgaccacccacatgttcgccgaactcaagtcgagtttttccaacgtcggtatcaacttggagattcgagaggttcctgactcggtggctgagtcccaagcctgtaagcccaacgacacgaactgcaagtgggacctgtcattctttggttcgcagtcatcgtggtactacccggtctacgcgtccggtgagcggctcttccaaagcggtggcccggtaaacctgggcagctactccgacaagaaagccgacgagcttattgacgcgtccatgcgttcgaacgatcggacagccctcaaaacgtacaacgcctatctggctgaagacctgccggtgttatggatgccgaacccggtcaatcgcgtctcagcatggaaatccaacatccaaggaatcgatccacaggaccccatgctgtacctgtacccgcaggactggaccatcagatgacctcacgcagagtgagcccacgttactgaccccgcccgtttcacacggcgtcaccgggtcgccccggtgacgccaccccaacgtcccaatcacccatctcaggagggagcaaaggatgacgcgatacatcgcgcaacgcgtttttcaagcgctgatagtgctgttgctcgtcacgcttatcactttctccatccttcacgcacttccaggcggagcagctcgctcggctttgggactggacgccacccaagcgcagatcgacgcatacaaccatcagatgggttacgaccaacccttatggaagcagtacttcggctatctgatccagatcttccatggcgaattcggacactctttccgactcaacatgccggttgccgacgcgatcggtcagcggcttcctaagacgattgtcctcagtctcatgtcggcagtcgtcgccatcctcctcgcgatccctatcggcgctatccaagccgtcaagcgcaaccgcacggctgactacactctcaccgtcatcgccatgctggcatattccacaccattgttcttcctgggcctcgttctcatcatcctcttctcacaggtgtggccgatcttcccaccagaagcgccacaagggttcagcgtcggagaagttcttagccaagggcgatcgctcgtgctgcccaccacgacgctcgccatcgtcacgctggccgtgtacgcgcgctacatgcgttcctcgatgattgacaacctcgaggaaaactacatccgcaccgcccgcagtaagggaatcaccgagacaagagtcgtcatcgttcatgccctgcgcaactcgctgtttccgatcatcaccctactcggcatgcagttgccggccttgttctccggtgcgctggtagtggagtcgctgttcaactaccccggcatgggtctgttgttctggcaggcggcccagttccgcgactaccccatcctgctagcagtcaccatcatcatctcaatggccaccgtgctcggcgccctcatcgcagacatcctctatgccgtcgtcgatccgcggattcgttacggaggagcagaccgatgagcaccgagatcgctattcccgatcctcagagccgacgtcccgaatctgcccgtcccatgcgtcccggcacagcgcgacggaccagcagacgcaccagcctcttcaaacagggggtggaggtgttcttcgagaaccgtttggccgtcgtaggatttgtcaccctgcttatcatcgtcgttctgtgcttcatcggaccgtcgatctggcgcaccgatcaggtccacacccagctgtccagcgcttacctccccatctccggcacgcaccctcttggtacggacgcggtgggctacgaccagctcggacgactcatgctcggcggccagacatccatcatcgtcggcctggcagctggcatcctggccaccaccatcggaacgatttggggcgccacagccggattcgtcggaggatggttagacgctgcgatgatgcgaatcgttgactcactcatggctatcccggccttgttcctcttcatgctcatcgccacgctcgtcacaccgaccgtgcccttgttggtactcatcattggcgcatttgcttggctcaacccagctcggctcatccgcggtgagtcgctggctctgcgcagccgggaatacatcgtcgctatgcgtggcatgggcggtagctctctgcgcgccgtacgcactcacgttgtgcgtaatgccatcggcaccgtcatcgtcaatgcaaccttccaggtggcagacgccatcctctacgtcgcgtacctgtcatttctcggcctcggggttcccccaccagcggccaattggggcggcatgctttccgacgggctcgccgaggtctactcgggtcactggtggctgttatacccgcccggggtactcatcatcattctggttgtcgcgtttaacttcgtcggtgacggattacgggacgccttcgaggttcggctgaggagtagatgacatgagcatgtcacagcccgaagacatcttgctgcgtctgcaagatctggaggtcactattgacgtgcgcggtggcagggtcgcgcctttgcggggctgctccatggaagtacgacgcggcgagacgatcggtctagtcggcgagtccggatccggtaagacgatgacagcgctatccatcatgggcctgctcccccacggtggacgggttaccggaggatccatcgtcttcaacggcagggacctcactagttcgccacccgacgagacccggcgcattcgcggtatggacatcgggatgatcttccaagacccgctcacctcactcaacccgacgatgaaaatcggtaaccaagtaggcgaagcgctgagaatccacaaggtggcctcgaagaagaaggcttgggaacgctctatcgacctcctgcgcaaggtgggaatgccacgtccggaaaagatcgtcaatgactatccgcatcagctgtctggtggtatgcgtcagcgagtcatgatcgctatggcactcatctgctcacccagtcttctgatcgcggatgagccgacgacagctttggatgtaacgactcagcggcagatcctcgacctcattgacgacctcaagaaggagttcaacaccgccgtcatcctggtgacacacgatctgggagtagttgcgggccgggccgaccgggtagccgtcatgtatgcgggtcagatcgtcgaggtggcatcgtctaccgacattttcatcaacccccagcaccagtacacgcgctcgctcattgccgcactgcctgagcagaccaccgatacccgtgaggagctctacaccatccctgggatgccgccggacctgcgcgagaagatcgtcggctgcgccttcgctactcgttgcccgctggccactgagatctgcactcagtccaaccctcacatggtcaccctgggcagaaccgacgcgccaagtgccaacaacgaacccgccaaccatgtacatacctgcttccatccggcagggccgccgctgaagcgccgacacgacctacgcccggagcgagacctgtccagccaccccgttgtgtgctcagtgcaagatctccataaaaactaccctgccatgagcagcggcgtcatccggcgtcaaatcgggtgggtacgggccgtcagcggtgtcagctttgacgtctatgagggcgagacactggggatcgtcggtgaatccggttgtggtaaatcgaccttagggcgcgtcatcactgcgttggaaccagcgacctcaggctccgtgtgcatcaatggcaaggatattgctcaggcgtcacgcagggaacgcaccctcttgcaccgcaatgtacagatgatgtttcaggattcctacgccgcaatggatccgcgcatgcgagtagacgagatcctctccgagccccttagcatccaaaaaatcggagaccggcgttcgcgtgccgacgctgcggacaatctcatcgacaagatcgggctgtccgataacgccttgtcgaagtacccgcatcagttctctggtggccaattgcagcggatcggccttgcgcggtcactgatgctagaaccccatctcattgtctgtgatgagccagtcagtgccttggatgtatccgtccaggctcaagtgctcaatctcatgcgcaggctccagcaggagcagaacctcacctacatcttcatctcccacgacttgtctgtcgtcaggtacatgtcggatcgaattgccgtgatgtacttaggaaaaatcgtggaaataggtgaggctaacaaggtcgtcgaccacccacgtcacccgtatacgcgggcactgatcgaggcgatccccgttgctgaccccgcgcatcacgtggaggagatcgtgcgtctgcagggtgaaccagccagtgccatcgacacgcctccggggtgccgtttcaaaaatcgatgcccatttgccaccaacaagtgcgccgaagaacccccgttagtgggcgacactcaccgagtggcctgccacttccctctaccacacgacgtcttggaagtatcatgagccaccccggcgcctatcgaccggtcgtcgccatcgatattggcggcacaacgatgactattgccgaagtccgttccgacggaagcgtacgagatccggtgacaatggacagccccgcacgaatccatggcgacgaagtggtggcccgaatatgcgagcttgtcgagacccgctggccccatccgtgccggatcggcatagggaccgcaggagtcgtcgaccctatcagtggctcgatcggcagagcatccgactccttccaagggtggaccgggtacccactacgcgaacgtctggaagaggcccttggcgtggcggtccaagtggaaaacgacgtcaatgccttcctcgttggcgagcaacggttcggcgcagcggccggggagcgcgactgccttgggatcatgcttggtaccggtgtcggcggagccgtcatcctcgacggacaggtgattcatggtcggcgcggggccgcagccgaaatcggtcatatgcctgcgctaggaaacgatcgatgcagttgtggcgtccccggacacctcgagtcactcgctgggggaagggccatcgcccgacgctgggctgcggccactggacgggatcccaaatccgtcaatggcgcccgtgaggttgcccgccgggcggcaaacggcgatgctgtggcgccgcgaatactcgccgaagctggaaaagccctaggaatcgcactagtacaagccgcgaccctgtttgatctgagtacggtcatcgtcggaggaagcgtcgcaagggcatggcagtggctctcgcccggcctgcacgacgtcgtgacggcgtacccgttgatctccggggctgaattgcgggtgcgtcttgcctcgcttagcgaccgcgcggtcctcataggcgcagccagtcttggggtctgcgacgatcaatggacgaagccatgctgaacttcgacgaacgcaccggcccgaatcagggagtgaacgccccgcactggccgtcggtccaggtgcctcaatggtggaaagatgccaaactcggattcttcatccactggggcttgtactcggttcccgcctgggcgaccaccaatcccgacccggtaccacttgagcaggagtacgcccaccactgctacgccgagtggtatgcaaacacggtgcgcatcctcaactctcccactcgccgacatcacgacagggtatacgggatcggaacgagctatgaggacttcgccgactggtggagccccgacctagatgcacctgccacgctgatccgtcgaattgctgacgccggggccgggtacgtcatcccgacgacgaaacaccatgacggattctgtctgtggcataccgacacgaccggcttcaatgccgctaaacgaggaccgcaccaagatctcgtcaaggccttgcacgacgaggcgcgagcggcaggacttagattcggcgtctactattcgggagcgctcgactggcatgttggggacttcggggcgatcacctctgataccgagctgttcaccttccgccgcaacgaccccgacttcgccaaatactgcgccgctcaactcactgaacttatcgcacggttccgaccagacatattgtggaatgacattgagtggcccgatgcgggcaaggggagtcagccctacgggctcgccagcctgttcagccactacctgaagcaagtacctgagggggtcgtcaacgaccgctggggagtatcccaccacggattcctcactcgggagtaccgtcatgttgacgccaaaatcaacgaaccgtgggagtcgacgcgggggctcggacgttcttttggctacaaccaagaagagtcgacagacgagagccttagtggcaccgagctcgtccagtacctcgtggatgtcgtcgctaaaaacggaaatctgctcattaacgtcgggccacgcgctgacgggtctattcctgaggtgcaggccgctgcaatggccgaactcggacggtggatgagggtgcacgatgaagccattcggggtacccgaccctggggaaacggggtctacggtgaccagcgcatcgtcaagcgtggggaaactgtctacgtccatctgctcgacggggacgcgctccacctccctgacgagctccagggcttcgatgtcagctggatcggcagccagagcaagcagacctctgtgccatgcgagctcgttaaccagccggtcaaggtcgcgaggctcacccggtgaggatggatcccagtcatgtagtaaacaccgaccgcgataggacctcttagttgtgagggggatgggaccggcagagctatctcagtgaagcgattcccgggaggtcaccacacccggagcgcatcccgttcgtccatacgcagcggttgcagctttgagggcgtgtcctccgaggtccaatcgttgcgaccacgtacttatgcataaggtcg

SEQ ID NO: 75 - DNA, 18948 bp, Propionibacterium acnes
catcatgccgacgtcaaggatcggcgcggccatccaccggaggacacgctgaggcccgaatgatgagggccgtaggaatctcgactcttccgctgggttccgttccaagggcaagacgggccgcagtttctcccacggcagcgaaatcaagccgcaccgtcgtgagcgctggccgagtggccaccgaatggggatgatcatccatgccaacaaccgagacatcctcgggaaccctcaaccccaacctgtcaagaccagttaagaggccgagagccacatcgtcgtttccacataggactgcggtcacccggtgcgctcgtaccgcccgcgcaacgtgcatacccgtctcgaccgaccacccagtcgccaacggttcgagcggcgggagacctcgggtagccaggacttcgcgccatcccgcacatcgtggatcagggtgccctgcaggaggcactccgacgtaggcgatgcgacggtggcccaaatccgccaagtattcggtggccattaccgcaccggcatgatcgtcgatccacgcccgagaccagggttcacctccctcgggtctgcctccggcaatagcaaccgggagatcgacgggcaacccaggcaggagggccacgctgggggaatcaaattcgaggacgacaaccccgtcagctcgagcgtctaaggcacattgcatggtggaacggcatcgctccggcgaccccgccaatacatgtagggaggtctcgacaccgaggtcgagggctgcgctgagtacccccgaaagcgtcgcccagtagccggtgcggccgatgtcggagacgagaacatgcagccgggcaacgttggggtcggtgcgccaatatcccagctcggtggccgcggtgaggatctcctcggtggcctgtgggagggtaccttcagcgccattctgacgtgccaaggcacgcgacgccgttgccaaggagacgccggagcgctcggcgacgtcagccaaccgcggaggccaccagggccgcctcaccatggccgggtcacgttccatgcaccggacgataccgggttcacacccctgtcctcggcaagggcgtccgcggaagaccagggcgcgacggggccgcatccgcggctgctgaggtggagcgagctggggtggacggaacgggaatcgacgtcgccgatgggctaggaagaggcgaggggatcgtcgtggtaagcgtccagaccgctgccgtggccgaatccgagccctcgatcacccggctgtcagctacgacaatcggcaagccggtgaattttgagtgcagggtacgccccgccccatctgcaagcaggtgccagcgattgaggctgccctcagtatccgacgtcgtccgaagaccggacccgacgacgacctcgtgcttcccagcctcgacgtcgagaccgaggaccgcaccgccaggagtcgaaaggctgtaagtgcagtcgccgtgccgaaccacacaccaagtctgaggctgcgcctgcagagtagggacaccgtcgtgacatgccaagaatcgcccgtccgcgctagtcagccggtagtcgccggactccagtgccggattgggggcgtaccaagcgcgcacgtagtcgatgtcaaaactcgccgggagccgactgacgactggggtccccagatgcccctcaagactgagcaccatgtgccgcgacatccgccacagcgaagagtcgccaggtttcgtctcccaggccaggtgtcggtcacagtaaaatcggagtcgaccgtcgctgcgttcgacgccatacgtgtggtaatcccgcgagatgtcgacgccaaccgggtaggcgtggcctccgaagcgccggtgcgtggcctctgtgttatcgggccacacgtgggtcgcgatgttcatcttcgtgtggtcaaaagtctcctcgacgtcaagctccgggtttggctcggcgccggtaagcaaggaagggccaccgtcgagggcggacgactgcatccagatggccgacagcacccgggcggccgagggcaacaccttggcacgcacctcgacgtaggtgcaaagacccggcacgtcaaagactgactcaacagcgccaaacgtgtaggaaaaactatcgacttgctcggcacgagcagctacatggagttgcccgcctgagaaagacacattcgcgtctcgaaagaggccgcgtcccgagtgtgggtaccacaggccgcgatgccactgggccgagctgtaagtcggatcggtgaattcgtctccaacacccaggagggtccagccagcaaggtcgatatccgcgtcggcggcgatagcccgatcgtggtcggcaaccaccggaacggccgccgtgagaacggcggctccgaggactgatctacgtgtgatcagtgtcatgtgtgctcctttgcaacaactcactccctaactggggttccacgcagcctacgacgaatgaccgcggtcaccacgagcgcgtgaaaacggcctttcatgcgctgtggacggcccttttcccggctcctagggtgaacgacatcacgaacgacggccaatgccggccagccaggagttcaccaccatgcacgatgtcacccctgtcatccagccgtttcggctcacgacggcccccgaccaaccggtcggcttggcagccgggactcttgacggcgcggtgacgcttcccctcgtcgaatgcctcaccctcgaacacggccgatacttcgtcgaccatcgcctcacccagactacggtgggatccggtctgcgtcccgttcgccgcgaaccgctcacctcgccgtggcccggcacccgcgtcatccagcatgatccaggatccgacctcaccgtcaccgtcgatctgtggcatcccacctcagcgaccttgcacgggcgaacaaccgtacataatgacggcacgctcccagtccatctcactgccgtctctgtcatgtgcgccagtctgctgtctggagccgaactcgatgacctcgatatactcatcgcccccagcgcatggatggccgaacaacggtggacccatcaccgcctgtccgatcttctggtggacgtcggcaccgaattgcatggagaatccccgcgcgaccgcttcgtcctatcctcagagtccggttggtcttcaggacgctgggaaccagtcggcttcattaccgacccggcctctggacgcgccgtcggctggcagatcgagcacaacggtggctggactgtcgaattagcccggcgctcttcaaccctcgacctctgcctcttcgggccgaccgaccttcagcaccactggatgcaccagctcaaccctggcgagactttcactacccccacggtgacgttagtggtatccgataacagctggcagggcgcggcagccgaactaagcacctaccgccgtgcgttgaggggcaacaatggcacagcagctccgatcttcttcaacgactacatgaacaccctcatggccgaccctacggccgagcgactctcaaccctcatcccggccgcagctcgcaccggagccgaggtgtactgcatcgacgccggatggcactccgacgacacagactggtgggccgacgtcggtcgctgggagccctcgccccgccgatttcccggcggactgcgccacacccttgatctcatcgtcgcttacggcatgacgcccggcctgtggattgagccgctggcggtcggtctgcgcagtcctctcgtcaatgatctacccccggaggctttcatgcgccgcgcaggggttccgatcgtcgaacagaatcgggtgcgtctagatatgcgcaatccgcaagctcgcgctcacctcgataccgtcatcgaccggatggtcagttacggcatcggctacctcaagattgatgacaatttctctgtcggttctggccccgacgaggacgcggattctccgggggacggtttgctggagcactgccgcgcttgggccgcctggcttgccgacctccctcgacgtcaccctggacttgtcgtcgagaactgtgcatctggggggcatgaccaccgactacgccctgttggcccggacagccatccagtcgacatcagacctccaggattcggtgcgttacccgcccatcgccgccaattcaccgatgacgatgttgcccgaacaagccgccaattgggcttacccacaaccagacatggacgacgaggaaatcgtctttaccgtcacgacctccttggccggcaccttttacctgtccggtcatgtcgaccgcatgaacgcccaccagatggctctcgtgcaatccggcgtagaggtaaaggccttacgatcagatctgaccagccacataccgtggtggccgaaaggccttgccagctgggacgacgagtggatcgtcaccgggcgtcgaaaaaagtcctctcgcgacggggtgatcattgtctggcaccgtcctagcaccgaatcgacggttctcgacttacctgatctggctgggacccacctcgaacccctttacccacctgcctgtctggtccccgacccgggaattcacattgctgactcatcgagctcacctcggctgaattgtccgtctcccaaaccaaccggccgggtcttccgcgtccgggaccttcacgattgcgtcaccgatgtcgcagaaatggagaagaaatgaatcgcaccctcaaggccgccgcagtaggagccctcgcggcattgtgcctcactgcctgctccgacccaggctcagactcgtcgcaatcctcaggaccggagtcatggccgtcagcaaccaccaatctcaacggtgtggagttgacaatgtgggctgcccagtcgtcggcgtcaatccctcaacaggtcgccgcgaacttcaacaaggctaccggggccaagatcaagatcgtcacgatccccgacccctacgagcagagcgtccagaccaaagtcgccaccggtgacgtccctgacctggccatgtggcagccaacgacgtccatgctcacgagcctgggagccaaagagcatctgcaggtgctcgacgacgccccatgggagtcgaagactgacaaaaacgtcctggctgccggaggttctctcgacgggcaccgctacgccgccttcgtctcagccccctcggtcatgggcgtttggtacaacaaagaaattttcgccaagaacggtatccaggtaccgaagaatttcgacgagatgctcaccattgccaagaagctcaaggctgccggccagaccccgttctacgagatgggcggagagtggtgggcctcccagtgggcagtccaggtgcagctggccgacgccgctaaggccggtctgtgggacaaggtcaacaaggacgaggacaagttcaccggcgctgagatccaaggtgctatcaacacctacgacaccatgatcaaggacggtctgttcaattcggacatcgcaaccggaactttcaacgaccaagccaaggcgctgcttgacgggaaagcagcgatgaccattcaagtaacgagcctattgggcaacatggccgcccgagccgacaccgccactctcaacacgaagatcggattcttccccatctctaagtcgggcaccgtggcaacgtcgatacccgaccagaccaacgccgtggtcgccttcaagtcgaaggatgccaagagggagactgcagcacgtcagttcatcacctactggttatccaacgactacgcatccttcatcaaggcacaaaacaccgtttccatcattgatggtgttaaaacacccgattccgtgcccaaagccctcatcgactcgaacgccaccctcaaaggctcggtcggctcgatgcagtctctggctgtcgccaaccccgacttagctaagaacctcggtgacatgatcgctggcacgaagaccccagcacaggtgggctcagaaactcagtctcagttcgcccagctcgccaaggcgattggcgcgaaagggttctgatccgtatgtcctcgacggaagccgcgccgcgacacggcagtgcacaccagtcgcatccctggggattcgtcgtacccgcgttcgccgtgctcgcggtgttcttcctcacaccaacgatctacaacttcatctacgccttcaccgactggtcgagcttcaaaacgaccatcaacccggtgggatggagcaatttctccgatctcatcgcatcaggaagcctgcggaaatccttgattatcacccttatttatgcggctggcgttgccgcgttgcagaatctgttcggactgatgctggccatactgttagagcgcgacaccctcgtcaacaagatcgtccgggtgatcttttttatccctgtgatcctctcggcgctagcgactggttacatcttccaagcgttgctgcgccccgacggcgggctcaaccagatgctcggaatactcacaggatctccggtaaaagtctcctggctgggatcgacgacgtggactctgctcgtgtgcattgtcattcactcgtggaagtggatgggcatgtcgatgctcgtgtacctggccgggcttaagacgatcgatgcccaagtgctcaaagcggcacgcatcgacggggcgtcacggtgggcgaccttccaccagatccgcttgcctctcatcgccccagcggtgacgttcaacgtcgccaccgccttgctagggtcgatgaactccttcgatattgtccaggcgaccaccggcggaggccccggcggctccaccgaactgcttaacctcttcatcttccgaactttcggccagggtctctacgctcaggcgacgacgatgagcctggtgctcttcgtggccgtcgtcatcttggcattccccatgatcgggatgcttcgtcgccgtgagggaaggatgtcatgaccaaacgcatcattcagccacttggcgcggtactgctagccgtgctcgtcgtcgggatacccctgtggacggtcgtcgtcactgcaggaaagtcccaggccgaagcactcatcccggacatgtcattgccacaccactggcaactgtggaccaacgtctccactgtcaccagccagacaaggatcggctgggcatatctgggctcgttgttcctgctggtgccctcggtggtcgtcgtcttgatcatcggatcgatggcatcgtgggtattggctcgacgcaaaggcaagctcgtctccgtgatctacgcgctagggatttcgggcatcatcctgccgccagcggtcgtcaccttggtgttactgctgcgtcagctgggattggctggccgccccatcggaatgatctgtgcctatgtcgggatgtacctgtcgacggtgatcttcttcgtcactggattcgttcgcacgatacccgaatccctcgaagaagccgcccgaatcgatggagctggaccaatgcgcatctttgtgacggtcatcctccccctgctgcgaccagtactggcaactgcgacgattctcatcagcctgtacgtgtggaacgacgtcttctacgccttctttgtcgtaggggccggatggacaccttgccgctgaacttgtttacagtcgccagtgccggggtacacctcaataactggcatctcatcttcacctatgtgctgctcatgagcgtgccgatcgtggtgctgttcattgtgttccagcgcagcatcatttcaggcattacttcgggtgcggtcaagtaacccttcttaccgcctgggaccttcgatcggactggcgaaatctccacaacgctcaaccggtagtgacagtgaggtctggatcctgcatgtcctcgtcgaagggaaagatcggacgacgcagacggttatgacccagacgtataaggtcctggtccacaccgccaggggtgagcgccatgatccaatcggcggccaagtcgtaaaggtccggctcgagatacccgatcttcaccacgactatgtcggtcgtccgagggtccagttgtacccgctcaaactgttccagggtcgtgtactgattgcgccgagtagtcacgatgacgctaagccccccgactcccagcactgccgtacgcaggccgccaggatcgtcaacgaggcaacgcacctgggcactcaggtggacagggccaggcttgcgagtatcgacatgtccccctaaatccacctcaaccatgcccccgacgcccgctttgtcagcacgtttcacgacctgtgggtcatagatggaagcataaatcgcggagagctccccaccagtgatctcgggatgggtcaacaatacagatagcgcaatcgtcacgtcatcagcaccgccggcgcccggattgtcccccgagtcggaaataacgaacggtcgtcgcgatgacgccaccgccctgtctaccgcttcttcgatcccatcggtgggagcgacgaagacgaattcgcgacgcaccttccagaagaactgtgcaatctcgctcaccccgtcgcgtacgcggttctcgtcgtcaccgaacccgacgacggctgccgtgcagcggggctggtcggcccaagcaaagccgatccacaccccgacatcgataacaccgtcgtgagccgccacctcgggcaccatgccgtagagcgaagccgctggttcgagtctggtggacgtcttttcaccgggtaacagaatgggcacggtgaccatcgccttgatcggtttgcccttcccggaacgcagtcgctcgcacaatgtccgagctgccctctcccgtgacacccacgcatcctcgtgcggtgccatccgatagcaggtgagcaggtcgcagcccgcgaagagtttttcagagacgtttccgtgcaggtccatcgaagcgcccaccatcggctcgggaccaaccacgtcgcggatggcgctgatgagatctccctcaacgtcgtcgtaccccggcacgctcatggctccgtgaatgtcgaagaagatgccgtccacatgaccggccttcgccaggccgtcacagatttcggcgcgccacttctcgtaggtcagacgctccacgggtcctcccggcagggctgagcagtgcaggatcggtacccactcaacgtcatggttccatggacgttttgtcggcacatcccactcctcgcctgcgatagcccggggcacctggtctataccggggatcggggactcggtgatccacgggtatcgctccagcagtgtctggccgcgacgctgcgcgaagtcagcggccgtgctcatgtagggggtgaaagtactcgattcaatatgaagtccacaaatggctatccgtatcatcagcgattgccttcctgcgagatgggcatatgagagtcaagtatcgacatgccgatgagcggggcatcggctccgcaagcggaggtctcgataacgagatcctcggtgcacataggcaaacagcgctcgtacagttcactgcgtacgccagcgagcaaagaacccatctgcgacattgagccgcccaacacgatgcgaaccgggttgaggaagttaacaaggttggaaagcacctcaccaagacgcattccggcgtcacgcactaaggaaaccgcctggggatcgccgctgttctcggcagtcaccaactgtgaggttgtggaaatggacgagcccaaacggcccagctgccgtaggatcgcagcccccgatgccaccgtctccaaacatccggagttaccacaggtacacggtagggggttatcggtgtgcacccgcagatgggtgatgtcgccagcaagaccgcgtgagcctgggtaagcgaccccgccgctgacccaaccagcacctatgccggtaccagctttgacgtagatgcaggagtcccggtgccgtccgcgacagttccactccccgattgtcgcggcacgagcgtcattctcgataactgatggcaccgcgagttcctgtgtcaacatgcctgcgatgtctttgccactccacccaggcatccgcgctgccccaatgacgtgaccactaccgtccaccgggccgggtaccgccaaaccggctgaaaccaccgctccagggatctcgtcaccaagcttgtgccaccccttggccaaggctttgatcgtcttctccggaccgatctctatgtttatcttgatgtcgtcggtagcgagtagctcgccctcccgagacgctattgccaaccgggcatgatgctggccaagttctgcaacaaaggcattgccgactgctggtgcaacgcgcaatttagtgggacgacgaccaccggtggaatcggcgcacgcatactcttcaacgactcgcgactcgagcaggtgccgcaccgccgcgctcaccgtggaacgtggcatggacgtgctctcggcgatctcggcgcgagtcatacccggcgtttttcgaagaatcttgatgactcgctgcccaggagcgctgcccagctgatcgtcagtgtgcccattcatgcccgtcgcgccaaggttggtgagctcaatatctgtcatcagcttcctcaatccgtcatcgtgcctgcccgacgtctcggcccacagtatgcccgcgtccggagatgtgtgtagcaaaagtgataaaagctagattattttacattcgaagcatccgaagtcatcaccttgcgctactcttacggtagtaagggtttatcccaccaggcaacggaggctgagagaactcatgaagaaaccacgaaagagactgcttgtggtgaccgcagcggtggcagcaactctgttggttgcctcgtgctcgtatggcagtggcgaccccagtcggtctaagacaagcggcggcgcgcacgatggcaacgtatccttcgcgaccaccacgcccaactggatcctcccggtgtccgcacccggaaagacgcagggtgagaacgccatgttcacccagctcatctaccccgccttgttctcctacaagctcgacgcgaagaacgagttcaacatcgatgaacgccactcggtggccaaacccccaccgtatccgacgactcactcacctacaccatcacccttaaggaccgcacatggagcgacggcgtcaagctcactacgcgcgacatggagttctggtggaacatcgtcaccaacaacaccgacaagtgggcgtcctaccgcaaaggccagttccccgacaacgtcaaggctttcaagatcattgacgacaaagccttcaccatcaccacgactgagaagtacaacccggcatggttcatcaacaaccaactgaaccgccttgtgccaatgccagcccacgcctggtctaagaccagcgactccgacaagcccggtgagaaggaccgcacccctgccggagccaaggcaatcttcaaatacttgagcgccgcctcggagaacttacagaactacgacaccaacaagctctggaagacgactctcgggcccttccagctcggcaagtacaccccgaacggtgaggccaagctcgtcgccaatcctagctacgacggtgaagacaaggcgagcatttcgagcttcaccatgcagccgtacaccagtgacgacgctgagttcaacatcctgcgctccggaagcatcgactacggcttcatcccacccaactcgatgacccagcaaaagtacatcgagaaacagggctataccgtcaaaccgtggtacggctggtcgatcacctacatgccgtttaacttcaacaacccgaagtccggcccgatattcgcccaaaaatatatccgtcaggcgatgcaacacctcattgatcaggaaggaatctccaagatcatctggaaccggactgcatcccccacctgcggtccggtaccccagcaacctggcaccgccggtagctccaaaggttgcgcctacgactacaaccctgcgaaagctgagaaactcctcaaagaccacggttgggatatcactaaggacggagtcaccacctgtcaacaagccggggagggagaaggccaatgcggcaaaggaatcaagcagggggccaagctttccttcaccgtgatctcccaatccggtttcacctcgaccacccacatgttcgccgaactcaagtcgagtttttccaacgtcggtatcaacttggagatccgagaggttcctgactcggtggctgagtcccaagcctgtaagcccaacgacacgaactgcacgtgggacctgtcattcttcggttcgcagtcatcgtggtactacccggtctacgcgtccggtgagcggctcttccaaagcggtggcccggtaaacctgggcagctactccgacaagaaagccgacgagcttattgacgcgtccatgcgttcgaacgatcgggcagccctcaaaacgtacaacgactatctggctgaagacctaccggtgttatggatgccgaactcggtcaatcgcgtctcagcatggaaatccaacatccaaggaatcgatccacaggaccccatgctttacctgtacccgcaggactggaccatcacatgacctcacgcagggtgaagccacgttactgatcccgcccatttcacacggcgtcactgggcgccccggtgacgccaccccaacgtcccaatcacccatctacaggagggagcaaaggatgacgcgatacatcgcgcaacgcgtttttcaggcgctgatagtgctgttgctcgtcacgcttatcactttctccatccttcacgcacttccaggcggagcagctcgctcggctttgggactggacgccacccaagcgcagatcgacgcatacaaccaccagatgggttacgaccaacccttatggaagcagtacttcggctatctgatccagatcttccatggcgaattcggacactctttccgactcaacatgccggttgccgacgcaatcggtcagcggcttcccaagacgattgtcctcagtctcatgtcggcagtcctcgccatcctcctcgcgatccctatcggcgctatccaagccgtcaagcgcaaccgcacggctgactacgctctcaccgtcatcgccatgctggcatattccacaccattgttcttcctgggcctcgttctcatcatcctcttctcacaggtgtggccgatcttcccgccagaagcgccacaaggattcagcgtcggagaagttcttagccaagggcgatcgctcgtgctgcccaccacgacgctcgccatcgtcacgctggccgtgtacgcgcgccacatgcgttcctcaatgattgacaacctcgaggaaaactacatccgcaccgcccgcagtaaaggaatcaccgagacaagagtcgtcatcgttcatgccctgcgcaactcgctgtttccgatcatcaccctactcggcatgcagttgccggccttgttctccggtgcgctggtagtggagtcgctgttcaactaccccggcatgggtctgctgttctggcaggcagcccagttccgcgactaccccatcctgctagcagtcaccatcatcatctcaatggccaccgtgctcagcgccctcatcgcagacatcctctatgccgtcgtcgatccgcggattcgttacggaggagcagaccgatgagcaccgagatcgctattcccgatcctcagagccgacgtcccgaatctgcccgtcccatgcgtcccggcacagcgcgacggaccagcctcttcaaacaggggtggaggtgttcttcgagaaccgtttggccgtcgtaggatttgtcaccctgcttatcatcgtcattttgtgcttcatcggaccgtcgatctggcgcaccgatcaggtccacacccagctgtccagtgcttacctacccatctccggaacgcaccctcttggtacggacgcggtgggctacgaccagctcggacgactcatgctcggcggccagacatccatcatcgtcggcctggcagctggcatcctggccaccaccatcggaacgatttggggcgccacagccggattcgtcggaggatggttggacgctgcgatgatgcgaatcgtcgactcactcatggctatcccggccttgttccttttcatgctcatcgccacactcgtcacaccaaccgtgcccttgttggtactcatcattggcgcattcgcttggctcaacccagctcggctcatccacggtgagtcgctggctctgcgcagccgggagtacatcgtcgctatgcgtggcatgggcggtagctcgctgcgcgctgtacgcactcacgttgtgcgtaatgccatcggcaccgtcatcgtcaatgcaacttttcaggtggcagacgccatcctctacgtcgcgtacctgtcatttctcggcctcggggttcccccaccagcggccaactggggcggcatgctttccgacgggctcgccgaggtctactcgggtcactggtggctgctatacccgcccggggtactcatcatcattctggttgtcgcgtttaacttcgtcggtgacggattgcgggacgccttcgaagttcggctgaggagtagatgacatgagcgtgtcacagcccgaagatatcttgctgcgtctgcaggatctggaggtcactattgacgtgcgcggtggcagggtcacgcctttgcggggctgctccatggaagtacgacgcggcgagacgatcggtctagtcggcgagtccggatccggtaagacgatgacagcgctatccatcatgggcctgctcccccacggtggtcgggttaccggaggatccatcgtcttcaacggcagggacctcactagttcgccacccgacgagacccggcgcattcgcggtatggacatcgggatgatcttccaagacccgctcacctcactcaatccgacgatgaaaatcggtaaccaagtgggcgaagcgctgagaatccacaaggtggcctcgaagaagaaggcttgggaacgctctatcgacctcctgcgcaaggtgggaatgccacgtccggaaaagatcgtcaatgactatccgcatcagctgtccggtggtatgcgtcagcgagtcatgatcgctatggcactcatctgctcacccagtcttctgatcgcggatgagccgacgacagctttggacgtgacgactcagcggcagatcctcgacctcattgacgacctcaaaaaggagttcaacaccgccgttatcctggtgacacacgatctgggagtggttgcgggccgggccgaccgggtagccgtcatgtatgcgggtcagatcgtcgaggtggcatcgtctaccgacattttcatcaacccccagcaccagtacacgcgctcgctcattgccgcactgcctgagcagaccaccgatacccgtgaggagctctacaccatcccggggatgccgccggatctgcgcgagaagatcgtcggctgcgccttcgctactcgttgcccactggccactgagatctgcactcagtccagccctcacatggtcaccctgggcagaaccgacgcgccgagcgccaacaacgaacccgccaaccatgtacatacctgcttccatccggcagggccgccgctgaagcgccgacacgacctacgcccggagcgagacctgtccagccaccccgttgtgtgctcagtgcaagatctccacaaaaactaccctgccatgagcagcggcgtcatccggcgtcaaatcgggtgggtacgggccgtcagcggtgtcagctttgacgtctatgagggcgagacactgggaatcgtcggtgaatccggttgtggtaaatcgaccctaaggcgcgtcatcactgcgttggaaccagcaacctcaggctccgtgtgcatcaatggcaaggatattgctcaggcgtcacgcagggaacgcaccctcttgcaccgcaatgtacagatgatgtttcaggattcctacgccgcaatggatccgcgcatgcgagtagacgagatcctctccgagccccttagcatccaaaaaatcggagaccggcgttcgcgtgccgacgctgcggacaatctcatcgacaagatcgggctgtccgataacgccttgtcgaagtacccgcaccagttctccggtggccaattgcagcggatcggccttgcgaggtcgctgatgctagaaccccatctcattgtctgtgatgagccagtcagtgccttggatgtatctgtccaggctcaagtgctcaatctcatgtgcaggctccagcaggagcagaacctcacctacatcttcatctcccacgacttgtctgtcgtcaggtacatgtcggatcgaattgccgtgatgtatttaggaaaaatcgtggaaataggtgaggctaacaaggtcgtcgaccacccacgtcacccgtatacgcgggcactgatcgaggcgatccccgttgctgaccccgcgcatcacgtggaggagattgtgcgtctgcagggtgaaccagccagtgccatcgacacgcctccggggtgccgtttcaaaaatcggtgcccatttgccaccaacaagtgtgccgaagaacccccgttagtgggcgacacacaccgagtggcctgccacttcccactcccgcacgacgccttggaagcatcatgagccaccccggcacctatcgaccggtcgtcgccatcgatattggcggcacaacgatgactattgccgaagtccgttccgacggaagtgtgcgagatccggtgacaatggacagccccgcacgaatccatggcgacgaagtggtggctcgaatatgcgagcttgtcgagacccgctggccccatccgtgccggatcggcgtagggaccgcaggagtcgtcgaccctatcagtggctccatcggcagagcatccgactccttccaagggtggaccgggtacccactacgcgaacgtctggaagaggcccttggcgtgacggtccaagtggaaaacgacgtcaacgctttcctcgttggcgagcaacggttcggcgcagcggccggggagcgcgattgccttgggatcatgcttggtaccggtgtcggcggagccgtcatcctcgacggacaggtgatccatggtcggcgcggggccgcggccgaaatcggtcatatgcctgcgctaggaaacgatcgatgcagttgtggcgtccccggacacctcgagtcactcgctgagggaagggccatcgcccgacgctgggctgcggccactggacgggatcccacatccgtcaatggcgcccgtgaggttgcccgccgggcggcgaacggcgatgctgtggcgcgcgaatactcgccgaagctggaaaagccctaggaatcgcactagtacaagccgcgaccctgtttgatctgagtacggtcatcgtcggaggaagcgtcgcaagggcatggcagtggctctcgcccggcctgcacgacgtcgtgacggcgtacccgttgatctccggggctgaattgcgggtgcgttttgcctcgcttagcgaccgcgcggtcctcataggcgcagccaatcttggggcctgcgacgatcaatgaaagaagccatgctgaacttcgacgaacgcaccggcccgaatcagggagtgaacgccccgcactggccgtcgacccgggtgcctcaatggtggaaagatgccaaactcggattcttcacccactggggcttgtactcggttcccgcctgggcgaccaccaatcccgacccggtgccacttgagcaggagtacgcccaccactgctacgccgagtggtacgcaaacacggtgcgcatcctcgactcccccacccgccaacatcacgacagggtatacgggatcggaacgagctatgaggacttcgccgactggtggacccccgacctagatgcacctgccacgctgatccgtcgaattgctgacgctggggccgggtacgtcattccgacgacgaaacaccatgacggattctgtctgtgggataccgacacgaccggcttcaatgccgctaaacgaggaccgcaccgagatctcgtcaaggccttgcacgacgaggcgcgagcggcaggacttagattcggcgtttactattcgggagcgctcgactggcatgttggggacttcggggcgatcacctccgataccgagctgttcaccttccgccgcaacgaccccgacttcgccaaatactgcgccgctcaactcactgaacttatcgcacggttccgaccggacatattgtggaatgacattgagtggcccgatgcgggcaaagggcgtcaaccctacgggctcgccagcctgttcagctactacctgaagcaagtacctgagggggtcgtcaacgaccgctggggagtatcccaccacggattcctcactcgggagtaccgtcacgttgacgccaaaatcaacgagccgtgggagtcgacgcgggggctcggatgttcttttggctacaaccaagaagagtcgacagacgagagccttagtggcactgaactcgtccggtacctcgtggatgtcgtcgctaaaaacggaaatctgctcattaacgtcgggccacgcgctgacggctctattcctgaggtgcaggccgccgcaatggctgaactcgggcggtggatgagggtgcacggtgaagccattcggggtacccgaccctggggacacggggtctacggtgaccagcgcatcgtcaagcgtggggaaactgtctacgtccatctgctcgacggggacgcgctccacctccctgacgagctcaaggtcttcgatgtcagctggatcggcagccaaagcaagcagacctctgtgccatgcgagctcgttaaccagccggttaaggtcgcgaggctcacccggtgaggatggatcctagtcatgtggtgaacaccgaccgcgataggacctctacgcgataggacctctagttgtgaggggatggaccggcagagctacctcggtgaagcgattcccgggaggtcaccacgcccggagcgcatcccgttcgttcacacgcagcagttacagttttgagggcgtgtcttccgaggtccagccgctgcgaccacgtacttatgcataaggtcg

SEQ ID NO: 76 - DNA, 13940 bp, Propionibacterium acnes
agcaagcacggcaccaaccgggtgatctttcagttgtgccacggcttgacgatgcttctcgtcgagacggacggcttcggtagcctgcaacgcaccgagcacaacccgctgggacgccttgccccacgcctcgaacacctcgtgtgcagcctccgggtccaccgcgatgttccattcacttgtcggcccggtattgccacgataattgatcgccccacccatgacgtgcagcccccgcaacaaccgcggcaattccggttcttcccgcagcgccagcgcgaggttcgtcaacggcccggtgacgatacccaccaacttccccgggtattggcgcgcgagatcaacccacagttgtgccccgctacgcgaatccgggtgacgcccgcactcccctagcacagcgtgccccaacccgtgcggcccgtgggtctcctcggcggtcatgagaggctcgacgagcggaacgtccgcccctcgggcaaccggcacgcccattccgagcagatcagtcaccccaagcgcgtttcgcagtacgtcgtcctgccccacgttgccggcagtcgtcaccaccccgacggtctcaacgtcgtcacggcaggccacgtaggccagggcgaaggcgtcgtcgatacccggatcgcagtccaacaagacgggcagggagcgcgtagaagtcgacatgtcgccacactaaggcttcgaccgttgtggcgtcaccctccgatgcgtccaccaaacttgtagcgggattcatgaagaagcgccgcggaacagaccgtgctccatccccgcgatgatgaactcaattttgagatcgagattcccgcgctcccccatgtcctgcattccgaatagttcgggtagctctccagcgatcctcacaaacttgtccaatccggtgcgaccttcttcatcacaggtcatgtacggctggaccgacatgtacgtctccaaggccgtgtcccccgcgaagtccagggcgaaggctgccccttccttgcccccggggataccgagtgcggccaacctctcaacgatcgccgtgattcgcggtagagctactccgaaggcttcaggccgggtgacaataacggcggccgcctccggatagcggacacacatctgccactgccgatccacgacatcgcgcagcacgtcctgccaggtgcacaactgcggatccggttcgatgtcggcagctatcgcgctgatcgcggcaagctgcaactcctgacgggaactgaactcccggtacaaggcagtggccttcaccccaaggcgctcggcaaccgctcgaagagtgaaactgccaattccttcagctagggtagcgtcaatgacctgacgtcgtgtgaacgcaggtttacgccccggccgttttctcatcacggccgacccacgagcgaccaccccacagcccgttcccgggcatgccacagatcggcatacaggccgctgctggcaatgaggtcgtcatgggttcccacttgacaaaccctaccagtgcgatcgacgacgactatctgatccgccgaacgaatggtgtcgagcttgtgggcgataacgacgattgtcgacgtctgccgcagctgggtcacagcggcctcgacatgggcctcgttctccgggtccaaagccgaggtggcctcgtcgaaaagcagaatcggggcgcgtttgagcaaggcccgagctaccgacacccgctgacgttcgccacccgaaagccgacgacccccttctccgacgctggcatcccaaccgcccggaagacgatcagcaatctcgtcgacaccggccagggctccggcctgacgcacgtgctcatcggtggcgtccgggcaaccgatgcggatattttccgtcagggtggagtcatagaggtacacatcctgaaacaccatggcaagctgactcatgagctgctcagtagtctgatcgcggacatcgaccccaccaactcgcaccgttccggaatcagcatcccagaacctggcaatgagccgaaacagagtggacttgccagcgcccgagggtccgacgatagccgtcaatccgccggccggaacagtgaacgagacgtcgtggaggaccgggcgagcctggtcgtagccgagaggatctcgtcgacctcggcgaccggttcacgcgcagtctcgacggccagggtcgcagcaccgacattctccaacaccttcgtgtagcgcagcgaaaccccgacgaaagccaccgccacgaccgggttcaacgccccgatccgcccaggttcgcggcgagcacgatgagggtcacggcaatgccctgggccgtcaacccgaagacgaagctcgccaacactcctagccacagatccttgcgggcagcacgtctgctggccacctgggcatcatggagaggttgatagccggtggcacgtccagctgcccgcagtgcaggttgagattcacagaactcgactattcgggccgccaattcctgctccgtggggtacgtcaacgcttcaccgcgaagtttgagggcgcgtgaggcgatcgtgaggaggtacatggtcggaatggcaaggagcagggccaaccccaactgccatgaccacatccagcccaggaccatcatgacgagggtagtggtcatgcccttcaccagcggagcggtgaagtgtcccaagcactcgcctagcgtcatgagtccacgcgtcaacaggcgcgagagacgggcgggaaaactcggccgaaaccaccccagcggcaggctggcgacgtgatcaccgatacgggtactgaggtgactcaggatgtctatcgcgcatagataccccgtgctcgactgaaggtacgacaccacagccccggcagcggccagagcagcgagcacccacacccagccccaccaggcaaggcccaacgagggctgccccgcaacgaaagcggtgaacgtcgggatgacggcaaacaggccgactccctcgatcgctcccagcacaccggcccacaccaaggaactgtgcaaccgccgggtgccctcgttggtcaacaatggttggaacgcccgcaccaggaggatgtccccgacccaagaaagacgtgacgacgtggtgctcatcgggtgactccctccatgattcgtcccgccgacagccgcgcccagtagggctgttcggccagttgctcggcggtgccgcaggctgcgatagagccgttctccatgacgcagatgacatcagccccaatcaccgactcggcgtgatgaccgatgaccaacacggttcggcctcgagccaaagcggccagggcctgctggatctcggcctcgcagtctggatcggtggccgcagtcgcctcgtccaggacgagaatcggggcatcggccaacacggcccgcgcaatggacaggcgctgcttctgcccacctgacaagttggtgtcctcacccaggacggtgtcgaaaccggcgggcagggcatcaatgtcgtcgaggattcgggccgtgcgggcggcattgcgaacttgttcttcggtggcatcggggcgagccagggtaatgacgtcacggatggattgacgctgcaagtatgggtcctgcaagacgaaggagacgagtcggtaaaggtcggtcggggagagctccctgaggtccaccccaccgatgcgcaccgtgccgaaatcaggatcgcggaatcgggccaacatcgtcgcgagggtcgacttgcccgacccagacgggcccacgagggccgtgacagtgcccgggcgcagtgtcagagagacgtggttgagggccggaacctcgccgtcaggggtgtggtaggagacgctgatgtcgtcaaaggtgaccgtcgtgtcctcgggaatcgcggagctggtaccaggctcgtcgatctgctcgatagacaggacctcctgcagacgcaacgctgcaccaccagcttgctggtacatccacgccgtgcttccaagcacctcgacggtgcgcggcagcacgagggcgataagggagcaggtgagaacatcggcgacacccacccaaccggccctggccatgagtagaccgaagccgaggttgatcgccatgagcgcaggcaccgagatcaccgactgcgatagggcggacgccttgatgagcgggccgcaccagtcccagtaaaaccgggcgaactcctcgcaggcagtggtgaagcgtcggtgggccttgcctgtctgaccgaagttcttgacgacgtggatgccctcggtcaactcgatggcgttggccgagatgttggcaagtttgtcgttcatctcggcggtcttggcggtcatgccccgcatcgaccaccactgcaacagggcatagatcgggaaagtcgccagacagagcagacccagccgccaatccactacgaaggcgtagacgagcagtaccacggggatgccgatcgccgcggtctgctccaccggggcgtgggcgacaagtgcatgcacctggacggtgtcgtcctggatggccttacgcacctgcccggtggacgacgaactgaaccatgccagcggtgcccgggacaggcgcccgatgatgcgaccctgcaggacactgcgcagtttgaggtcagcgaaatgtgtgatgacaacggctagcacgtagagcagggcctgggtgcagaaggccgccaccaacaggttcgcggtatgtacgagggcctcgtggtcgatatgggcgctcagcaggatggtgccgagcttcaccaaggccagatagggggccaaggcgacgacgcaggaggcgatgacgataatccgcgccgccaggattcgtccccggaccggttgcataagcgatgagagggctctacccccggcgcggtgcttggcctgatagtcgtgggaactttcggcagatgcagtttcctgggctgccacggaggctggaggcgacggttgggacgggccaacgatggaggcaggatcccccgaggtggttctgctcacttcgtcagtcccgcccgccggaagtgtttgcgccccaccttgatgcccagccaaccaccgagaagtccaagcaggaacaccgcgacggcccatccggcgaccagaccgggggtaaacagtgctcgcatcttgttggaataatcggcacccatttgcttggtgatcatggcgtagtacttgtcggcgttcacgaccatcggtatcagtggcgcaaccacccaaagggtgaataccgcatagccgagggacgcccggcgcgggtccaggcgaacgttacgcccggcgttggtggtgaccagatcggcgatgaagccgagcacgagcccggcgggaatcatccagatagtgtgcccgggcatcataccgagtccgacgagcagcccggtgatcgtcaaagcgcccattttcgggacccgtgccattgacagcatcacgatgatcccgcccagcagaataccgaggatccagccaacgaacatgaacgccggcccggcgaaaccaatcatcccgcaggcgtagaaggcgacgaagaaaatcaccgcgaaaatggctacggtcaccagatcacgagtggtcaggcgtgatttcatgatttccctttcaaggtggcgatattgaccagaaagtccccgcaccgggccatgagctccgggtcgtgggtgatgacgatgacaaccttcccggcggtggcaagttcaccgacgagatcggcgatcgacgcgagatgtcggcgatcgacacctgaggtcggttcgtcgaaaatgacgacctccttgtcttgcgcgatggtggccgcgacgacgaggcgttgcgcctgcccacccgacaaggacaaggggtggcggtcatgttcgccagccaggtcgagacgtttcagaagtcccgatacgtcggcggcatctcgatgcggaagatccagtccgagggtgacttcacgttctaccgactcgctgaaaagctgacggcgaacgtcctgcatcaccatcccgcaacatttctgacgcctgccgggggtccagggcactcccatgacgatgcgagcttcggtaggggatttttcgagcccgcacacgattcgggccaaggtcgacttccccgcgccattcgggccggtcagaatcgtcaccgccccgccaggcaggaacagggaatcgatgtcgagaatcgtcgagccgggacggtaagagaaggcgaggtgctcgatggtcagccctgccgggatttttgtgcagccggctgaggcgggatcggagcgcatgaacttgcctcggggcaccggagtaagcggagccggagcctgcggcggcgccggcaggtcgaccgggttgacgtcgagactgcgcaagccccgttctagcaagtccccctctgtcagcgcgaaaaggctgctgccgctcattcgctcaacgatctggccattggaaacacgatgcacgtcgtcaacaagtccgcggaacagatgcagccggtgctcagcgatcacaagggtcttgttggcagctttgagctcggtgacgagagcgcgaaaatcgtcgatcccctcagccgagaggttcaaggtcggctcatcgaaaagaagcaggtcgacatcagccaccagcgcgcaggcgcaggcgacccgctggagttctcctcctgaaagggtgtcgaggtggcggtcgagcaggtgagagataccggttcgggaaaccgcacgggagacagcttcgcggatgtcaaccggatcgaccccatagttctccagcccgaaggccagctctgtgcgcacgctggaggtgaagaactgggtacggggattctggaaaatcaccgcggaggtgcggccgacatcgtgcagttcgacaccggccaggtcagtaccttggaccatgacgtggccgcgcaacgttcccccgaagaattgggggacgagtccattcatcgtccgcaatagggtggatttccctgaccccgacgctcctactagcaaggtgagggtgcctggttggatcgtcatcgtgatgccacgaagctgttctacgaactcccgctcgggggccggaccgtcggagaacggcgaggagtcggggtcgaacgaggggtagccgtagctgacgccgttgaggctgacgatgctcacacaatcacctcgctaacacgccacacaaccaacgcggccaaaatcgtcagcacgagggcgtcgccgacacgaaaacgactcggctgggtgttcgatcgggatttttgtgcaccgagtcccttgatgatggcggctgcggaaagttcgtcggcgatgcgggcagccgaggccaggaagggaatgacgacgtactctcccgtacgtatcgggtgacgcacagccgaccgcgccccagggttgaggccgcgcagggtcatggcctggacgattgctcgcagctcgcgtactgccatcgggaagaaccgaaccaccaccatgacgggcacataaatgacgcgcggagcatgcaattgggtgaggaccgcgccgactcgagtgacgtcgaggactttgatcgccgctactgccgcaccaaagactccggcgaaccgaaacatccagaaggcgatgaagaccaggaacgccgatactgtcgagcgccacagcactgggagtaggaagcagcagaaaatccacaccagcacgaagatcgtccagctgatccaggacttcgaccgggtagtcaagaccaagaacacccacaccactccaagactggtcatcacgagggctgttgatcctgctcccatgagtaggacgttgagaacgatgacgtagagggcgagggtgcgtggatccaccgcgccgaagagctgccgagatcggcgagtgtggaacgccgaagcagcatcgaaacctatcccggcaaccgagcgactatggggaacgcggtgagtggctccgggcagcgccagggtcgcctcatcatgtttcataaggtaaccctatctcataactgattgctgttaacaaataccttctctcccacgttgacccagagttggccatgatggcgccatatgagctccctgccaccacgtgaggcacgatggaggggccgacgaccagttaccgaagaacaggtgtgagcatgactgacgtggagaagtccccgactcgcggtgagaggattctcgccgctgtggtcgccttcaccctctggatggccgtgatattcgcgattgtggcgatcttcgtcggctggcggtggtctctgcggatgttcgtcggggtgctcctcatcggtatccccggagagatcgttatggagctcgtcggtcggggaccgttgctgccgagcggcgcgtcgagaatacggcgttcccgtggttcgcggttactcctctcggcactcatccttatcgtgtgggcgttcatcgttctcgcggcgattgcgctcattcagccctggtacggcgctaccggtgacatggcctgggtgatggtcgtagggatcgcggcgatcctcgtgcaggagggcaccgacacccgcaagaagaagtcctgatcatctctcatgaagggcttgtcggctcctcgcatacaagggggtcgatagtggtggccggaacgtgcgggtttgatctcgccacaatcatggataccgccagctttggtgtccgtccctgccacaaagcatcacaaaagcatcggtttacacgtcagcatcgctgctgcggttgatcgtgaggccacctgagaccattcagggcaggctcacccattcccttccgatttacacctcgtgcgaactcgcaccgcctacaattccagagcaacgacgcctcatccccgtcgccatagtcaggaaaacactgatgatgcccagggtccgcccgtgacgaagaagagctccctcgtcctggcgatggcgtccatcggtgccatcgctgttgggctgaccgggcgtgctcgtcagctcaccctcgccttcaactccgcgagttggctcgtcgccgtcatcgcgctgagctatctcatccgctccgggcacagcgaaaaaacagcatggctggcccaaccaccgagggtgcccgaggcacagccgccaggcggttgacggtctcctcgacgtgcattctcacaccatcgcacggcgaacatccaccgatccgctgcccaagcacggctaccctggaactcagttgagtgagaggagacccgcgtgggcatcggaagcaacatcggcaaggcactgttggcccaagcccccgacatggcacccggcgcagctgtctcactactacgcagcatcctcggattcgctatcgacggcgcctcagggctgccgggagcgcgtcaggctgccggcaagacgctcaccaagcacgagggcgatattgagcaggcgatcagctccttagtcaatcagcacattgcgatggccggggcccaggggttcgtctccaacctcggtggcgtcgtcactctggccgtgactatccccgccaatatctccggcgttgcgatcgtgcaagcccgcatggtggctgccatcgcccacctgcgcgggtacgatctcgacgaccagcgggtccgcaccgccatcctcgccactctcatgggtcagcgcgaggtcgatagcctcgtccacgaggagaagctaccgacgacaccgatgggcatcgctaccgctccagtcggtgacgccgatctcgaaaaggtcgtcgcccggaacctcgtcaatgtccttatggggcaggtcgcaggtaagaagctgcctgtgttcgtctccaagcgcgttcctgtacttggcggcggagtcggtgccaccgctgacggattcaccacgtggagcgtggcccgctacgcccgtaagcaattccccacccgccgtccacgcacctgagacccgcacactcgggatacggccaggacgattcgggggcaggaatagtggcgtccgaccacagtgacaggatctggccgggattcaacgacgcagggatttcaccccgcccagcccccatgcgtacccgacaacacctaggaaggcacaaacgacggcacacaccatggccatggtagacactgtcggcgcactcccctcgacggcggccgtttttcctggatagccgccggggaggaatcgcaggagggtcttcgactgtgcgacgaccacaaccaggtagatcaggggaccgcacaatggcccgactcgccgtgacaccattcccgtgacgaacaatgcgataccggtacacagcacgcaagtcaccgagaaccctatgaatggcggccacggcagctgaaaccgtgcgggaatttgcggtaccaggacggaatcaccatcaggtatcaactcaacgggcaacgatcgcagtacccatcctatgagcaatggaagaccagctgcacagccgcatatccacagccccatccacgcatatccaaccgtgagggaccgaaccgatgtcctctcgacccaatccatggccgatgagacacaccacatgatggtggcacaacccaccagaatgatcagctcgggaccagtcacagggcgatcccacacgtctctcggcgccaccgacagactcgccttccacaggaagaaggccacgagcaaggccacaagcggcgcaatgacaagggcactagcatggcgccccttcaggaaagtcgctacgcctctcatcggtgaagatcactggaggtcaatgaacacgtgcttaccgcatgatgatgctccgtataccaatgacggaatgcggttacatccatgccgtcaaggccatttcgttccgaactcgtcgcatcatcatgctgaaatccagccagccgaagaatggtacgttccacggaatcgacgccattgagggcccccatctgctgagatgtcaactccgaccctccggtctcacgcataaaagcacatgcgtcccggcctgaaaatgattgagccagcccctcacccgtcagatccgacatttgttgtctagagccatgtgaggtcggtcggccgagatcaatcacacgttgccccctgtatgtttggtacccagactcagcaagcaggacgtcacgggaaaccaccgtttgcggcaggacagacaagacgcgttgagcgggtttcgcgtaggacgccgcgagactccgatgtgctggcgtgacgcatacccgcacaccttcgtgcgacgaacactcaaaggctagtggcgcatcacgaaacaacggcaccggcaagacgacgcccacggcagcaatgatgagcggtggggcgatcaaggccacacaaggcatcactcgacgccagcagaacctgtcggcacggaccctggaccaacggctggcggtgaggatacaggacaaggtgacgatgcagaagaagatggcgcgcatgaccacggccgcgaccgtgacggtgtgggtgccacccggttccgacattcctaaagaccatgcaaaggtcaccgagccatgccccgtgttggcaaggagatttccgttgacgacgatcggcatttcgaccaggacgatgcacacaacaggtgccaccagccacacgatggggtgggacaccatcgcggccacgaggtgagcaacggccaccaaagccgcgaatgacagcaggacgacgattaagtcggaggcttcggcgacggtcggagtcgcattgagccacgtcttagcgaccagcggggccgccacgatgaccgtcccgatgaggagggcagccgcctgccgccagaaccagtgccagtgaatgccaagaatggaccgcgccggagcaacccccacaaccatgtccgaaggtgccgtgcgtgccgctaggcccgcccccatgaggccagccacgatgccccacagcatactggactccaggagcgtgacggcgacatcctgcacttgccacaacccccaagcccatcgacctcgcaacgcaatgaagctgcacatggctcctccgaccgtcacgagaaccatgtgccatgacgtgaaggggaatgccatgcggtgaaaaccgcgcagcggacgtataccctgaagcgaagtgagcatcacgctgcgcccccgagaagagtgaggtatccagcctcagcatcgttggtattacggactgggtgccctcggccaacagattccagttcggaatacgagccctcgaagatcagctttccctcggacaggacgacgagttgcgacacgaagccctggagatcctcaagcaggtgagtcgacacaatgaccgtccgatcttcggcgagctcaccgaagagggatcgcaccccaatccttgatgccgggtcgaggcctaccgtcggctcatcaagcagtagtacagctggatcgccgacaatcgcacacgcgattccaagtcgttgacgcattccacccgacagggactggacgcgctcatcggcgcggtcaagaagcccaacacgatcgagggctgcacatgccctcgcacggcattcgctcggttcaacgtctcgcgcccaggccgcatattccaccgcccgccggatacggaagtgcgacgggagggaaaatcgctggggcaggaatccgaccaaaccacggatggtgtcgacgtcatcgctgacatcgacaccattcacccgaaagtggccggactccggttcacggagtgtcgcgaggatactgagaagtgtcgactttccggccccattcggaccgagcagcccccacaaaccagagccaaactcacaggaaatatcaaccaggctacgccgatggcggtaacggtgtgatacgtgcttgagttcaatcattcacttgaccgtaacgtaacccaatttcgctgatgccatacgacgccctttctgaagcagaaacatctccaatggaaaacccgctaccgcatccatactttcacttaaagtgaggcagtgtcaatcttgtggcaaattcggtggcacatatcgcgctcccgcaattcttctcagaatcgggtcagtacagcattgccgacgccgggtcagagaggatctccgcaacgtcgtggaggaatgtcgaaccctgctcaccgtcaataagacgatgatcgaacccgaggctcatcgtcgtcacccacctgggcacaacgcgctcgtcatcaccggtcccgacgacccacggccgccgagcgagagcaccgagcacgaggatcgctgactctgtccggttgaccacgggagtaccggcatcgagcccgaacaccccgacgttcgtgatcgagaaggtaccgtcggcatagtcgggcggttgcagtttgtcttccttggcgatcgcaacgatccgggtgatctccgtcgccaactcaagcatcgccatgtcctgggcgtcgcgcaccaccggcaccataaggccgcgaggcgtggcggcggcaatgccgaggttgatgtggtcacggaagacgatctggtcagcggcgtcatcccatgcggcgttgatgatgggggtgcgccccatcgccaggcacaccgccttgcaccacaccgtcagcggggagacacgcaggcctttgaaacgacggtcggcacgcagccggttgaccagctccatcgtcggggtgacgtcgcaggtaaggaaggccgtcacgagggccttcgtatccaaggaatccttcacggccttcgctgtgaccttgcgcaccccacgcactggcaccttgcgggtgtggccgtcgggctcggtcggggcgccaccgaggagacgtcgagacatcaccgacaggctcgccagctcggcgtcgccaggacaagcaccgccgtccccggctgcagcagcgccatgatgagcggccgctttgacgtcactcctcgtcactgcaccctgcggaccggtgccggtcacctgagacaagtcgacgccgaggtctgctgccaatcgtcgggccggcggcttggcaagaatgtgcgcggtgcggtccatgcgcggtgggtcttgacgaggagccggctcggtcagacgctgctccggtttcgcctcggcgtcgtgccgagattccgaaaccgattgctcaggatgagtgtctgcac

SEQ ID NO: 77 - DNA, 13940 bp, Propionibacterium acnes
agcaagcacggcaccaaccgggtgatctttcagttgtgccacggcttgacgatgcttctcgtcgagacggacggcttcggtagcctgcaacgcaccgagcacaacccgctgggacgccttgccccacgcctcgaacacctcgtgtgcagcctccgggtccaccgcgatgttccattcacttgtcggcccggtattgccacgataattgatcgccccacccatgacgtgcagcccccgcaacaaccgcggcaattccggttcttcccgcagcgccagcgcgaggttcgtcaacggcccggtgacgatacccaccaacttccccgggtattggcgcgcgagatcaacccacagttgtgccccgctacgcgaatccgggtgacgcccgcactcccctagcacagcgtgccccaacccgtgcggcccgtgggtctcctcggcggtcatgagaggctcgacgagcggaacgtccgcccctcgggcaaccggcacgcccattccgagcagatcagtcaccccaagcgcgtttcgcagtacgtcgtcctgccccacgttgccggcagtcgtcaccaccccgacggtctcaacgtcgtcacggcaggccacgtaggccagggcgaaggcgtcgtcgatacccggatcgcagtccaacaagacgggcagggagcgcgtagaagtcgacatgtcgccacactaaggcttcgaccgttgtggcgtcaccctccgatgcgtccaccaaacttgtagcgggattcatgaagaagcgccgcggaacagaccgtgctccatccccgcgatgatgaactcaattttgagatcgagattcccgcgctcccccatgtcctgcattccgaatagttcgggtagctctccagcgatcctcacaaacttgtccaatccggtgcgaccttcttcatcacaggtcatgtacggctggaccgacatgtacgtctccaaggccgtgtcccccgcgaagtccagggcgaaggctgccccttccttgcccccggggataccgagtgcggccaacctctcaacgatcgccgtgattcgcggtagagctactccgaaggcttcaggccgggtgacaataacggcggccgcctccggatagcggacacacatctgccactgccgatccacgacatcgcgcagcacgtcctgccaggtgcacaactgcggatccggttcgatgtcggcagctatcgcgctgatcgcggcaagctgcaactcctgacgggaactgaactcccggtacaaggcagtggccttcaccccaaggcgctcggcaaccgctcgaagagtgaaactgccaattccttcagctagggtagcgtcaatgacctgacgtcgtgtgaacgcaggtttacgccccggccgttttctcatcacggccgacccacgagcgaccaccccacagcccgttcccgggcatgccacagatcggcatacaggccgctgctggcaatgaggtcgtcatgggttcccacttgacaaaccctaccagtgcgatcgacgacgactatctgatccgccgaacgaatggtgtcgagcttgtgggcgataacgacgattgtcgacgtctgccgcagctgggtcacagcggcctcgacatgggcctcgttctccgggtccaaagccgaggtggcctcgtcgaaaagcagaatcggggcgcgtttgagcaaggcccgagctaccgacacccgctgacgttcgccacccgaaagccgacgacccccttctccgacgctggcatcccaaccgcccggaagacgatcagcaatctcgtcgacaccggccagggctccggcctgacgcacgtgctcatcggtggcgtccgggcaaccgatgcggatattttccgtcagggtggagtcatagaggtacacatcctgaaacaccatggcaagctgactcatgagctgctcagtagtctgatcgcggacatcgaccccaccaactcgcaccgttccggaatcagcatcccagaacctggcaatgagccgaaacagagtggacttgccagcgcccgagggtccgacgatagccgtcaatccgccggccggaacagtgaacgagacgtcgtggaggaccgggcgagcctggtcgtagccgagaggatctcgtcgacctcggcgaccggttcacgcgcagtctcgacggccagggtcgcagcaccgacattctccaacaccttcgtgtagcgcagcgaaaccccgacgaaagccaccgccacgaccgggttcaacgccccgatccgcccaggttcgcggcgagcacgatgagggtcacggcaatgccctgggccgtcaacccgaagacgaagctcgccaacactcctagccacagatccttgcgggcagcacgtctgctggccacctgggcatcatggagaggttgatagccggtggcacgtccagctgcccgcagtgcaggttgagattcacagaactcgactattcgggccgccaattcctgctccgtggggtacgtcaacgcttcaccgcgaagtttgagggcgcgtgaggcgatcgtgaggaggtacatggtcggaatggcaaggagcagggccaaccccaactgccatgaccacatccagcccaggaccatcatgacgagggtagtggtcatgcccttcaccagcggagcggtgaagtgtcccaagcactcgcctagcgtcatgagtccacgcgtcaacaggcgcgagagacgggcgggaaaactcggccgaaaccaccccagcggcaggctggcgacgtgatcaccgatacgggtactgaggtgactcaggatgtctatcgcgcatagataccccgtgctcgactgaaggtacgacaccacagccccggcagcggccagagcagcgagcacccacacccagccccaccaggcaaggcccaacgagggctgccccgcaacgaaagcggtgaacgtcgggatgacggcaaacaggccgactccctcgatcgctcccagcacaccggcccacaccaaggaactgtgcaaccgccgggtgccctcgttggtcaacaatggttggaacgcccgcaccaggaggatgtccccgacccaagaaagacgtgacgacgtggtgctcatcgggtgactccctccatgattcgtcccgccgacagccgcgcccagtagggctgttcggccagttgctcggcggtgccgcaggctgcgatagagccgttctccatgacgcagatgacatcagccccaatcaccgactcggcgtgatgaccgatgaccaacacggttcggcctcgagccaaagcggccagggcctgctggatctcggcctcgcagtctggatcggtggccgcagtcgcctcgtccaggacgagaatcggggcatcggccaacacggcccgcgcaatggacaggcgctgcttctgcccacctgacaagttggtgtcctcacccaggacggtgtcgaaaccggcgggcagggcatcaatgtcgtcgaggattcgggccgtgcgggcggcattgcgaacttgttcttcggtggcatcggggcgagccagggtaatgacgtcacggatggattgacgctgcaagtatgggtcctgcaagacgaaggagacgagtcggtaaaggtcggtcggggagagctccctgaggtccaccccaccgatgcgcaccgtgccgaaatcaggatcgcggaatcgggccaacatcgtcgcgagggtcgacttgcccgacccagacgggcccacgagggccgtgacagtgcccgggcgcagtgtcagagagacgtggttgagggccggaacctcgccgtcaggggtgtggtaggagacgctgatgtcgtcaaaggtgaccgtcgtgtcctcgggaatcgcggagctggtaccaggctcgtcgatctgctcgatagacaggacctcctgcagacgcaacgctgcaccaccagcttgctggtacatccacgccgtgcttccaagcacctcgacggtgcgcggcagcacgagggcgataagggagcaggtgagaacatcggcgacacccacccaaccggccctggccatgagtagaccgaagccgaggttgatcgccatgagcgcaggcaccgagatcaccgactgagacagggcggacgccttgatgagcgggccgcaccagtcccagtaaaaccgggcgaactcctcgcaggcagtggtgaagcgtcggtgggccttgcctgtctgaccgaagttcttgacgacgtggatgccctcggtcaactcgatggcgttggccgagatgttggcaagtttgtcgttcatctcggcggtcttggcggtcatgccccgcatcgaccaccactgcaacagggcatagatcgggaaagtcgccagacagagcagacccagccgccaatccactacgaaggcgtagacgagcagtaccacggggatgccgatcgccgcggtctgctccaccggggcgtgggcgacaagtgcatgcacctggacggtgtcgtcctggatggccttacgcacctgcccggtggacgacgaactgaaccatgccagcggtgcccgggacaggcgcccgatgatgcgaccctgcaggacactgcgcagtttgaggtcagcgaaatgtgtgatgacaacggctagcacgtagagcagggcctgggtgcagaaggccgccaccaacaggttcgcggtatgtacgagggcctcgtggtcgatatgggcgctcagcaggatggtgccgagcttcaccaaggccagatagggggccaaggcgacgacgcaggaggcgatgacgataatccgcgccgccaggattcgtccccggaccggttgcataagcgatgagagggctctacccccggcgcggtgcttggcctgatagtcgtgggaactttcggcagatgcagtttcctgggctgccacggaggctggaggcgacggttgggacgggccaacgatggaggcaggatcccccgaggtggttctgctcacttcgtcagtcccgcccgccggaagtgtttgcgccccaccttgatgcccagccaaccaccgagaagtccaagcaggaacaccgcgacggcccatccggcgaccagaccgggggtaaacagtgctcgcatcttgttggaataatcggcacccatttgcttggtgatcatggcgtagtacttgtcggcgttcacgaccatcggtatcagtggcgcaaccacccaaagggtgaataccgcatagccgagggacgcccggcgcgggtccaggcgaacgttacgcccggcgttggtggtgaccagatcggcgatgaagccgagcacgagcccggcgggaatcatccagatagtgtgcccgggcatcataccgagtccgacgagcagcccggtgatcgtcaaagcgcccattttcgggacccgtgccattgacagcatcacgatgatcccgcccagcagaataccgaggatccagccaacgaacatgaacgccggcccggcgaaaccaatcatcccgcaggcgtagaaggcgacgaagaaaatcaccgcgaaaatggctacggtcaccagatcacgagtggtcaggcgtgatttcatgatttccctttcaaggtggcgatattgaccagaaagtccccgcaccgggccatgagctccgggtcgtgggtgatgacgatgacaaccttcccggcggtggcaagttcaccgacgagatcggcgatcgacgcgagatgtcggcgatcgacacctgaggtcggttcgtcgaaaatgacgacctccttgtcttgcgcgatggtggccgcgacgacgaggcgttgcgcctgcccacccgacaaggacaaggggtggcggtcatgttcgccagccaggtcgagacgtttcagaagtcccgatacgtcggcggcatctcgatgcggaagatccagtccgagggtgacttcacgttctaccgactcgctgaaaagctgacggcgaacgtcctgcatcaccatcccgcaacatttctgacgcctgccgggggtccagggcactcccatgacgatgcgagcttcggtaggggatttttcgagcccgcacacgattcgggccaaggtcgacttccccgcgccattcgggccggtcagaatcgtcaccgccccgccaggcaggaacagggaatcgatgtcgagaatcgtcgagccgggacggtaagagaaggcgaggtgctcgatggtcagccctgccgggatttttgtgcagccggctgaggcgggatcggagcgcatgaacttgcctcggggcaccggagtaagcggagccggagcctgcggcggcgccggcaggtcgaccgggttgacgtcgagactgcgcaagccccgttctagcaagtccccctctgtcagcgcgaaaaggctgctgccgctcattcgctcaacgatctggccattggaaacacgatgcacgtcgtcaacaagtccgcggaacagatgcagccggtgctcagcgatcacaagggtcttgttggcagctttgagctcggtgacgagagcgcgaaaatcgtcgatcccctcagccgagaggttcaaggtcggctcatcgaaaagaagcaggtcgacatcagccaccagcgcgcaggcgcaggcgacccgctggagttctcctcctgaaagggtgtcgaggtggcggtcgagcaggtgagagataccggttcgggaaaccgcacgggagacagcttcgcggatgtcaaccggatcgaccccatagttctccagcccgaaggccagctctgtgcgcacgctggaggtgaagaactgggtacggggattctggaaaatcatcgcggaggtgcggccgacatcgtgcagttcgacaccggccaggtcagtaccttggaccatgacgtggccgcgcaacgttcccccgaagaattgggggacgagtccattcatcgtccgcaatagggtggatttccctgaccccgacgctcctactagcaaggtgagggtgcctggttggatcgtcatcgtgatgccacgaagctgttctacgaactcccgctcgggggccggaccgtcggagaacggcgaggagtcggggtcgaacgaggggtagccgtagctgacgccgttgaggctgacgatgctcacacaatcacctcgctaacacgccacacaaccaacgcggccaaaatcgtcagcacgagggcgtcgccgacacgaaaacgactcggctgggtgttcgatcgggatttttgtgcaccgagtcccttgatgatggcggctgcggaaagttcgtcggcgatgcgggcagccgaggccaggaagggaatgacgacgtactctcccgtacgtatcgggtgacgcacagccgaccgcgccccagggttgaggccgcgcagggtcatggcctggacgattgctcgcagctcgcgtactgccatcgggaagaaccgaaccaccaccatgacgggcacataaatgacgcgcggagcatgcaattgggtgaggaccgcgccgactcgagtgacgtcgaggactttgatcgccgctactgccgcaccaaagactccggcgaaccgaaacatccagaaggcgatgaagaccaggaacgccgatactgtcgagcgccacagcactgggagtaggaagcagcagaaaatccacaccagcacgaagatcgtccagctgatccaggacttcgaccgggtagtcaagaccaagaacacccacaccactccaagactggtcatcacgagggctgttgatcctgctcccatgagtaggacgttgagaacgatgacgtagagggcgagggtgcgtggatccaccgcgccgaagagctgccgagatcggcgagtgtggaacgccgaagcagcatcgaaacctatcccggcaaccgagcgactatggggaacgcggtgagtggctccgggcagcgccagggtcgcctcatcatgtttcataaggtaaccctatctcataactgattgctgttaacaaataccttctctcccacgttgacccagagttggccatgatggcgccatatgagctccctgccaccacgtgaggcacgatggaggggccgacgaccagttaccgaagaacaggtgtgagcatgactgacgtggagaagtccccgactcgcggtgagaggattctcgccgctgtggtcgccttcaccctctggatggccgtgatattcgcgattgtggcgatcttcgtcggctggcggtggtctctgcggatgttcgtcggggtgctcctcatcggtatccccggagagatcgttatggagctcgtcggtcggggaccgttgctgccgagcggcgcgtcgagaatacggcgttcccgtggttcgcggttactcctctcggcactcatccttatcgtgtgggcgttcatcgttctcgcggcgattgcgctcattcagccctggtacggcgctaccggtgacatggcctgggtgatggtcgtagggatcgcggcgatcctcgtgcaggagggcaccgacacccgcaagaagaagtcctgatcatctctcatgaagggcttgtcggctcctcgcatacaagggggtcgatagtggtggccggaacgtgcgggtttgatctcgccacaatcatggataccgccagctttggtgtccgtccctgccacaaagcatcacaaaagcatcggtttacacgtcagcatcgctgctgcggttgatcgtgaggccacctgagaccattcagggcaggctcacccattcccttccgatttacacctcgtgcgaactcgcaccgcctacaattccagagcaacgacgcctcatccccgtcgccatagtcaggaaaacactgatgatgcccagggtccgcccgtgacgaagaagagctccctcgtcctggcgatggcgtccatcggtgccatcgctgttgggctgaccgggcgtgctcgtcagctcaccctcgccttcaactccgcgagttggctcgtcgccgtcatcgcgctgagctatctcatccgctccgggcacagcgaaaaaacagcatggctggcccaaccaccgagggtgcccgaggcacagccgccaggcggttgacggtctcctcgacgtgcattctcacaccatcgcacggcgaacatccaccgatccgctgcccaagcacggctaccctggaactcagttgagtgagaggagacccgcgtgggcatcggaagcaacatcggcaaggcactgttggcccaagcccccgacatggcacccggcgcagctgtctcactactacgcagcatcctcggattcgctatcgacggcgcctcagggctgccgggagcgcgtcaggctgccggcaagacgctcaccaagcacgagggcgatattgagcaggcgatcagctccttagtcaatcagcacattgcgatggccggggcccaggggttcgtctccaacctcggtggcgtcgtcactctggccgtgactatccccgccaatatctccggcgttgcgatcgtgcaagcccgcatggtggctgccatcgcccacctgcgcgggtacgatctcgacgaccagcgggtccgcaccgccatcctcgccactctcatgggtcagcgcgaggtcgatagcctcgtccacgaggagaagctaccgacgacaccgatgggcatcgctaccgctccagtcggtgacgccgatctcgaaaaggtcgtcgcccggaacctcgtcaatgtccttatggggcaggtcgcaggtaagaagctgcctgtgttcgtctccaagcgcgttcctgtacttggcggcggagtcggtgccaccgctgacggattcaccacgtggagcgtggcccgctacgcccgtaagcaattccccacccgccgtccacgcacctgagacccgcacactcgggatacggccaggacgattcgggggcaggaatagtggcgtccgaccacagtgacaggatctggccgggattcaacgacgcagggatttcaccccgcccagcccccatgcgtacccgacaacacctaggaaggcacaaacgacggcacacaccatggccatggtagacactgtcggcgcactcccctcgacggcggccgtttttcctggatagccgccggggaggaatcgcaggagggtcttcgactgtgcgacgaccacaaccaggtagatcaggggaccgcacaatggcccgactcgccgtgacaccattcccgtgacgaacaatgcgataccggtacacagcacgcaagtcaccgagaaccctatgaatggcggccacggcagctgaaaccgtgcgggaatttgcggtaccaggacggaatcaccatcaggtatcaactcaacgggcaacgatcgcagtacccatcctatgagcaatggaagaccagctgcacagccgcatatccacagccccatccacgcatatccaaccgtgagggaccgaaccgatgtcctctcgacccaatccatggccgatgagacacaccacatgatggtggcacaacccaccagaatgatcagctcgggaccagtcacagggcgatcccacacgtctctcggcgccaccgacagactcgccttccacaggaagaaggccacgagcaaggccacaagcggcgcaatgacaagggcactagcatggcgccccttcaggaaagtcgctacgcctctcatcggtgaagatcactggaggtcaatgaacacgtgcttaccgcatgatgatgctccgtataccaatgacggaatgcggttacatccatgccgtcaaggccatttcgttccgaactcgtcgcatcatcatgctgaaatccagccagccgaagaatggtacgttccacggaatcgacgccattgagggcccccatctgctgagatgtcaactccgaccctccggtctcacgcataaaagcacatgcgtcccggcctgaaaatgattgagccagcccctcacccgtcagatccgacatttgttgtctagagccatgtgaggtcggtcggccgagatcaatcacacgttgccccctgtatgtttggtacccagactcagcaagcaggacgtcacgggaaaccaccgtttgcggcaggacagacaagacgcgttgagcgggtttcgcgtaggacgccgcgagactccgatgtgctggcgtgacgcatacccgcacaccttcgtgcgacgaacactcaaaggctagtggcgcatcacgaaacaacggcaccggcaagacgacgcccacggcagcaatgatgagcggtggggcgatcaaggccacacaaggcatcactcgacgccagcagaacctgtcggcacggaccctggaccaacggctggcggtgaggatacaggacaaggtgacgatgcagaagaagatggcgcgcatgaccacggccgcgaccgtgacggtgtgggtgccacccggttccgacattcctaaagaccatgcaaaggtcaccgagccatgccccgtgttggcaaggagatttccgttgacgacgatcggcatttcgaccaggacgatgcacacaacaggtgccaccagccacacgatggggtgggacaccatcgcggccacgaggtgagcaacggccaccaaagccgcgaatgacagcaggacgacgattaagtcggaggcttcggcgacggtcggagtcgcattgagccacgtcttagcgaccagcggggccgccacgatgaccgtcccgatgaggagggcagccgcctgccgccagaaccagtgccagtgaatgccaagaatggaccgcgccggagcaacccccacaaccatgtccgaaggtgccgtgcgtgccgctaggcccgcccccatgaggccagccacgatgccccacagcatactggactcccggagcgtgacggcgacatcctgcacttgccacaacccccaagcccatcgacctcgcaacgcaatgaagctgcacatggctcctccgaccgtcacgagaaccatgtgccatgacgtgaaggggaatgccatgcggtgaaaaccgcgcagcggacgtataccctgaagcgaagtgagcatcacgctgcgcccccgagaagagtgaggtatccagcctcagcatcgttggtattacggactgggtgccctcggccaacagattccagttcggaatacgagccctcgaagatcagctttccctcggacaggacgacgagttgcgacacgaagccctggagatcctcaagcaggtgagtcgacacaatgaccgtccgatcttcggcgagctcaccgaagagggatcgcaccccaatccttgatgccgggtcgaggcctaccgtcggctcatcaagcagtagtacagctggatcgccgacaatcgcacacgcgattccaagtcgttgacgcattccacccgacagggactggacgcgctcatcggcgcggtcaagaagcccaacacgatcgagggctgcacatgccctcgcacggcattcgctcggttcaacgtctcgcgcccaggccgcatattccaccgcccgccggatacggaagtgcgacgggagggaaaatcgctggggcaggaatccgaccaaaccacggatggtgtcgacgtcatcgctgacatcgacaccattcacccgaaagtggccggactccggttcacggagtgtcgcgaggatactgagaagtgtcgactttccggccccattcggaccgagcagcccccacaaaccagagccaaactcacaggaaatatcaaccaggctacgccgatggcggtaacggtgtgatacgtgcttgagttcaatcattcacttgaccgtaacgtaacccaatttcgctgatgccatacgacgccctttctgaagcagaaacatctccaatggaaaacccgctaccgcatccatactttcacttaaagtgaggcagtgtcaatcttgtggcaaattcggtggcacatatcgcgctcccgcaattcttctcagaatcgggtcagtacagcattgccgacgccgggtcagagaggatctccgcaacgtcgtggaggaatgtcgaaccctgctcaccgtcaataagacgatgatcgaacccgaggctcatcgtcgtcacccacctgggcacaacgcgctcgtcatcaccggtcccgacgacccacggccgccgagcgagagcaccgagcacgaggatcgctgactctgtccggttgaccacgggagtaccggcatcgagcccgaacaccccgacgttcgtgatcgagaaggtaccgtcggcatagtcgggcggttgcagtttgtcttccttggcgatcgcaacgatccgggtgatctccgtcgccaactcaagcatcgccatgtcctgggcgtcgcgcaccaccggcaccataaggccgcgaggcgtggcggcggcaatgccgaggttgatgtggtcacggaagacgatctggtcagcggcgtcatcccatgcggcgttgatgatgggggtgcgccccatcgccaggcacaccgccttgcaccacaccgtcagcggggagacacgcaggcctttgaaacgacggtcggcacgcagccggttgaccagctccatcgtcggggtgacgtcgcaggtaaggaaggccgtcacgagggccttcgtatccaaggaatccttcacggccttcgctgtgaccttgcgcaccccacgcactggcaccttgcgggtgtggccgtcgggctcggtcggggcgccaccgaggagacgtcgagacatcaccgacaggctcgccagctcggcgtcgccaggacaagcaccgccgtccccggctgcagcagcgccatgatgagcggccgctttgacgtcactcctcgtcactgcaccctgcggaccggtgccggtcacctgagacaagtcgacgccgaggtctgctgccaatcgtcgggccggcggcttggcaagaatgtgcgcggtgcggtccatgcgcggtgggtcttgacgaggagccggctcggtcagacgctgctccggtttcgcctcggcgtcgtgccgagattccgaaaccgattgctcaggatgagtgtctgcac

SEQ ID NO: 78 - DNA, 11835 bp, Propionibacterium acnes
gtagccgagaggatctcgtcgacctcggcgaccggttcacgcgcagtctcgacggccagggtcgcagcaccgacattctccaacaccttcgtgtagcgcagcgaaaccccgacgaaagccaccgccacgaccgggttcaacgccccgatccgcccaggttcgcggcgagcacgatgagggtcacggcaatgccctgggccgtcaacccgaagacgaagctcgccaacactcctagccacagatccttgcgggcagcacgtctgctggccacctgggcatcatggagaggttgatagccggtggcacgtccagctgcccgcagtgcaggttgagattcacagaactcgactattcgggccgccaattcctgctccgtggggtacgtcaacgcttcaccgcgaagtttgagggcgcgtgaggcgatcgtgaggaggtacatggtcggaatggcaaggagcagggccaaccccaactgccatgaccacatccagcccaggaccatcatgacgagggtagtggtcatgcccttcaccagcggagcggtgaagtgtcccaagcactcgcctagcgtcatgagtccacgcgtcaacaggcgcgagagacgggcgggaaaactcggccgaaaccaccccagcggcaggctggcgacgtgatcaccgatacgggtactgaggtgactcaggatgtctatcgcgcatagataccccgtgctcgactgaaggtacgacaccacagccccggcagcggccagagcagcgagcacccacacccagccccaccaggcaaggcccaacgagggctgccccgcaacgaaagcggtgaacgtcgggatgacggcaaacaggccgactccctcgatcgctcccagcacaccggcccacaccaaggaactgtgcaaccgccgggtgccctcgttggtcaacaatggttggaacgcccgcaccaggaggatgtccccgacccaagaaagacgtgacgacgtggtgctcatcgggtgactccctccatgattcgtcccgccgacagccgcgcccagtagggctgttcggccagttgctcggcggtgccgcaggctgcgatagagccgttctccatgacgcagatgacatcagccccaatcaccgactcggcgtgatgaccgatgaccaacacggttcggcctcgagccaaagcggccagggcctgctggatctcggcctcgcagtctggatcggtggccgcagtcgcctcgtccaggacgagaatcggggcatcggccaacacggcccgcgcaatggacaggcgctgcttctgcccacctgacaagttggtgtcctcacccaggacggtgtcgaaaccggcgggcagggcatcaatgtcgtcgaggattcgggccgtgcgggcggcattgcgaacttgttcttcggtggcatcggggcgagccagggtaatgacgtcacggatggattgacgctgcaagtatgggtcctgcaagacgaaggagacgagtcggtaaaggtcggtcggggagagctccctgaggtccaccccaccgatgcgcaccgtgccgaaatcaggatcgcggaatcgggccaacatcgtcgcgagggtcgacttgcccgacccagacgggcccacgagggccgtgacagtgcccgggcgcagtgtcagagagacgtggttgagggccggaacctcgccgtcaggggtgtggtaggagacgctgatgtcgtcaaaggtgaccgtcgtgtcctcgggaatcgcggagctggtaccaggctcgtcgatctgctcgatagacaggacctcctgcagacgcaacgctgcaccaccagcttgctggtacatccacgccgtgcttccaagcacctcgacggtgcgcggcagcacgagggcgataagggagcaggtgagaacatcggcgacacccacccaaccggccctggccatgagtagaccgaagccgaggttgatcgccatgagcgcaggcaccgagatcaccgactgcgatagggcggacgccttgatgagcgggccgcaccagtcccagtaaaaccgggcgaactcctcgcaggcagtggtgaagcgtcggtgggccttgcctgtctgaccgaagttcttgacgacgtggatgccctcggtcaactcgatggcgttggccgagatgttggcaagtttgtcgttcatctcggcggtcttggcggtcatgccccgcatcgaccaccactgcaacagggcatagatcgggaaagtcgccagacagagcagacccagccgccaatccactacgaaggcgtagacgagcagtaccacggggatgccgatcgccgcggtctgctccaccggggcgtgggcgacaagtgcatgcacctggacggtgtcgtcctggatggccttacgcacctgcccggtggacgacgaactgaaccatgccagcggtgcccgggacaggcgcccgatgatgcgaccctgcaggacactgcgcagtttgaggtcagcgaaatgtgtgatgacaacggctagcacgtagagcagggcctgggtgcagaaggccgccaccaacaggttcgcggtatgtacgagggcctcgtggtcgatatgggcgctcagcaggatggtgccgagcttcaccaaggccagatagggggccaaggcgacgacgcaggaggcgatgacgataatccgcgccgccaggattcgtccccggaccggttgcataagcgatgagagggctctacccccggcgcggtgcttggcctgatagtcgtgggaactttcggcagatgcagtttcctgggctgccacggaggctggaggcgacggttgggacgggccaacgatggaggcaggatcccccgaggtggttctgctcacttcgtcagtcccgcccgccggaagtgtttgcgccccaccttgatgcccagccaaccaccgagaagtccaagcaggaacaccgcgacggcccatccggcgaccagaccgggggtaaacagtgctcgcatcttgttggaataatcggcacccatttgcttggtgatcatggcgtagtacttgtcggcgttcacgaccatcggtatcagtggcgcaaccacccaaagggtgaataccgcatagccgagggacgcccggcgcgggtccaggcgaacgttacgcccggcgttggtggtgaccagatcggcgatgaagccgagcacgagcccggcgggaatcatccagatagtgtgcccgggcatcataccgagtccgacgagcagcccggtgatcgtcaaagcgcccattttcgggacccgtgccattgacagcatcacgatgatcccgcccagcagaataccgaggatccagccaacgaacatgaacgccggcccggcgaaaccaatcatcccgcaggcgtagaaggcgacgaagaaaatcaccgcgaaaatggctacggtcaccagatcacgagtggtcaggcgtgatttcatgatttccctttcaaggtggcgatattgaccagaaagtccccacaccgggccatgagctccgggtcgtgggtgatgacgatgacaaccttcccggcggtggcaagttcaccgacgagatcggcgatcgacgcgagatgtcggcgatcgacacctgaggtcggttcgtcgaaaatgacgacctccttgtcttgcgcgatggtggccgcgacgacgaggcgttgcgcctgcccacccgacaaggacaaggggtggcggtcatgttcgccagccaggtcgagacgtttcagaagtcccgatacgtcggcggcatctcgatgcggaagatccagtccgagggtgacttcacgttctaccgactcgctgaaaagctgacggcgaacgtcctgcatcaccatcccgcaacatttctgacgcctgccgggggtccagggcactcccatgacgatgcgagcttcggtaggggatttttcgagcccgcacacgattcgggccaaggtcgacttccccgcgccattcgggccggtcagaatcgtcaccgccccgccaggcaggaacagggaatcgatgtcgagaatcgtcgagccgggacggtaagagaaggcgaggtgctcgatggtcagccctgcggggatttttgtgcagccggctgaggcgggatcggagcgcatgaacttgcctcggggcaccggagtaagcggagccggagcctgcggcggcgccggcaggtcgaccgggttgacgtcgagactgcgcaagccccgttctagcaagtccccctctgtcagcgcgaaaaggctgctgccgctcattcgctcaacgatctggccattggaaacacgatgcacgtcgtcaacaagtccgcggaacagatgcagccggtgctcagcgatcacaagggtcttgttggcagctttgagctcggtgacgagagcgcgaaaatcgtcgatcccctcagccgagaggttcaaggtcggctcatcgaaaagaagcaggtcgacatcagccaccagcgcgcaggcgcaggcgacccgctggagttctcctcctgaaagggtgtcgaggtggcggtcgagcaggtgagagataccggttcgggaaaccgcacgggagacagcttcgcggatgtcaaccggatcgaccccatagttctccagcccgaaggccagctctgtgcgcacgctggaggtgaagaactgggtacggggattctggaaaatcatcgcggaggtgcggccgacatcgtgcagttcgacaccggccaggtcagtaccttggaccatgacgtggccgcgcaacgttcccccgaagaattgggggacgagtccattcatcgtccgcaatagggtggatttccctgaccccgacgctcctactagcaaggtgagggtgcctggttggatcgtcatcgtgatgccacgaagctgttctacgaactcccgctcgggggccggaccgtcggagaacggcgaggagtcggggtcgaacgaggggtagccgtagctgacgccgttgaggctgacgatgctcacacaatcacctcgctaacacgccacacaaccaacgcggccaaaatcgtcagcacgagggcgtcgccgacacgaaaacgactcggctgggtgttcgatcgggatttttgtgcaccgagtcccttgatgatggcggctgcggaaagttcgtcggcgatgcgggcagccgaggccaggaagggaatgacgacgtactctcccgtacgtatcgggtgacgcacagccgaccgcgccccagggttgaggccgcgcagggtcatggcctggacgattgctcgcagctcgcgtactgccatcgggaagaaccgaaccaccaccatgacgggcacataaatgacgcgcggagcatgcaattgggtgaggaccgcgccgactcgagtgacgtcgaggactttgatcgccgctactgccgcaccaaagactccggcgaaccgaaacatccagaaggcgatgaagaccaggaacgccgatactgtcgagcgccacagcactgggagtaggaagcagcagaaaatccacaccagcacgaagatcgtccagctgatccaggacttcgaccgggtagtcaagaccaagaacacccacaccactccaagactggtcatcacgagggctgttgatcctgctcccatgagtaggacgttgagaacgatgacgtagagggcgagggtgcgtggatccaccgcgccgaagagctgccgagatcggcgagtgtggaacgccgaagcagcatcgaaacctatcccggcaaccgagcgactatggggaacgcggtgagtggctccgggcagcgccagggtcgcctcatcatgtttcataaggtaaccctatctcataactgattgctgttaacaaataccttctctcccacgttgacccagagttggccatgatggcgccatatgagctccctgccaccacgtgaggcacgatggaggggccgacgaccagttaccgaagaacaggtgtgagcatgactgacgtggagaagtccccgactcgcggtgagaggattctcgccgctgtggtcgccttcaccctctggatggccgtgatattcgcgattgtggcgatcttcgtcggctggcggtggtctctgcggatgttcgtcggggtgctcctcatcggtatccccggagagatcgttatggagctcgtcggtcggggaccgttgctgccgagcggcgcgtcgagaatacggcgttcccgtggttcgcggttactcctctcggcactcatccttatcgtgtgggcgttcatcgttctcgcggcgattgcgctcattcagccctggtacggcgctaccggtgacatggcctgggtgatggtcgtagggatcgcggcgatcctcgtgcaggagggcaccgacacccgcaagaagaagtcctgatcatctctcatgaagggcttgtcggctcctcgcatacaagggggtcgatagtggtggccggaacgtgcgggtttgatctcgccacaatcatggataccgccagctttggtgtccgtccctgccacaaagcatcacaaaagcatcggtttacacgtcagcatcgctgctgcggttgatcgtgaggccacctgagaccattcagggcaggctcaccgattcccttccgatttacacctcgtgcgaactcgcaccgcctacaattccagagcaacgacgcctcatccccgtcgccatagtcaggaaaacactgatgatgcccagggtccgcccgtgacgaagaagagctccctcgtcctggcgatggcgtccatcggtgccatcgctgttgggctgaccgggcgtgctcgtcagctcaccctcgccttcaactccgcgagttggctcgtcgccgtcatcgcgctgagctatctcatccgctccgggcacagcgaaaaaacagcatggctggcccaaccaccgagggtgcccgaggcacagccgccaggcggttgacggtctcctcgacgtgcattctcacaccatcgcacggcgaacatccaccgatccgctgcccaagcacggctaccctggaactcagttgagtgagaggagacccgcgtgggcatcggaagcaacatcggcaaggcactgttggcccaagcccccgacatggcacccggcgcagctgtctcactactacgcagcatcctcggattcgctatcgacggcgcctcagggctgccgggagcgcgtcaggctgccggcaagacgctcaccaagcacgagggcgatattgagcaggcgatcagctccttagtcaatcagcacattgcgatggccggggcccaggggttcgtctccaacctcggtggcgtcgtcactctggccgtgactatccccgccaatatctccggcgttgcgatcgtgcaagcccgcatggtggctgccatcgcccacctgcgcgggtacgatctcgacgaccagcgggtccgcaccgccatcctcgccactctcatgggtcagcgcgaggtcgatagcctcgtccacgaggagaagctaccgacgacaccgatgggcatcgctaccgctccagtcggtgacgccgatctcgaaaaggtcgtcgcccggaacctcgtcaatgtccttatggggcaggtcgcaggtaagaagctgcctgtgttcgtctccaagcgcgttcctgtacttggcggcggagtcggtgccaccgctgacggattcaccacgtggagcgtggcccgctacgcccgtaagcaattccccacccgccgtccacgcacctgagacccgcacactcgggatacggccaggacgattcgggggcaggaatagtggcgtccgaccacagtgacaggatctggccgggattcaacgacgcagggatttcaccccgcccagcccccatgcgtacccgacaacacctaggaaggcacaaacgacggcacacaccatggccatggtagacactgtcggcgcactcccctcgacggcggccgtttttcctggatagccgccggggaggaatcgcaggagggtcttcgactgtgcgacgaccacaaccaggtagatcaggggaccgcacaatggcccgactcgccgtgacaccattcccgtgacgaacaatgcgataccggtacacagcacgcaagtcaccgagaaccctatgaatggcggccacggcagctcaaaccgtgcgggaatttgcggtaccaggacggaatcaccatcaggtatcaactcaacgggcaacgatcgcagtacccatcctatgagcaatggaagaccagctgcacagccgcatatccacagccccatccacgcatatccaaccgtgagggaccgaaccgatgtcctctcgacccaatccatggccgatgagacacaccacatgatggtggcacaacccaccagaatgatcagctcgggaccagtcacagggcgatcccacacgtctctcggcgccaccgacagactcgccttccacaggaagaaggccacgagcaaggccacaagcggcgcaatgacaagggcactagcatggcgccccttcaggaaagtcgctacgcctctcatcggtgaagatcactggaggtcaatgaacacgtgcttaccgcatgatgatgctccgtataccaatgacggaatgcggttacatccatgccgtcaaggccatttcgttccgaactcgtcgcatcatcatgctgaaatccagccagccgaagaatggtacgttccacggaatcgacgccattgagggcccccatctgctgagatgtcaactccgaccctccggtctcacgcataaaagcacatgcgtcccggcctgaaaatgattgagccagcccctcacccgtcagatccgacatttgttgtctagagccatgtgaggtcggtcggccgagatcaatcacacgttgccccctgtatgtttggtacccagactcagcaagcaggacgtcacgggaaaccaccgtttgcggcaggacagacaagacgcgttgagcgggtttcgcgtaggacgccgcgagactccgatgtgctggcgtgacgcatacccgcacaccttcgtgcgacgaacactcaaaggctagtggcgcatcacgaaacaacggcaccggcaagacgacgcccacggcagcaatgatgagcggtggggcgatcaaggccacacaaggcatcactcgacgccagcagaacctgtcggcacggaccctggaccaacggctggcggtgaggatacaggacaaggtgacgatgcagaagaagatggcgcgcatgaccacggccgcgaccgtgacggtgtgggtgccacccggttccgacattcctaaagaccatgcaaaggtcaccgagccatgccccgtgttggcaaggagatttccgttgacgacgatcggcatttcgaccaggacgatgcacacaacaggtgccaccagccacacgatggggtgggacaccatcgcggccacgaggtgagcaacggccaccaaagccgcgaatgacagcaggacgacgattaagtcggaggcttcggcgacggtcggagtcgcattgagccacgtcttagcgaccagcggggccgccacgatgaccgtcccgatgaggagggcagccgcctgccgccagaaccagtgccagtgaatgccaagaatggaccgcgccggagcaacccccacaaccatgtccgaaggtgccgtgcgtgccgctaggcccgcccccatgaggccagccacgatgccccacagcatactggactcccggagcgtgacggcgacatcctgcacttgccacaacccccaagcccatcgacctcgcaacgcaatgaagctgcacatggctcctccgaccgtcacgagaaccatgtgccatgacgtgaaggggaatgccatgcggtgaaaaccgcgcagcggacgtataccctgaagcgaagtgagcatcacgctgcgcccccgagaagagtgaggtatccagcctcagcatcgttggtattacggactgggtgccctcggccaacagattccagttcggaatacgagccctcgaagatcagctttccctcggacaggacgacgagttgcgacacgaagccctggagatcctcaagcaggtgagtcgacacaatgaccgtccgatcttcggcgagctcaccgaagagggatcgcaccccaatccttgatgccgggtcgaggcctaccgtcggctcatcaagcagtagtacagctggatcgccgacaatcgcacacgcgattccaagtcgttgacgcattccacccgacagggactggacgcgctcatcggcgcggtcaagaagcccaacacgatcgagggctgcacatgccctcgcacggcattcgctcggttcaacgtctcgcgcccaggccgcatattccaccgcccgccggatacggaagtgcgacgggagggaaaatcgctggggcaggaatccgaccaaaccacggatggtgtcgacgtcatcgctgacatcgacaccattcacccgaaagtggccggactccggttcacggagtgtcgcgaggatactgagaagtgtcgactttccggccccattcggaccgagcagcccccacaaaccagagccaaactcacaggaaatatcaaccaggctacgccgatggcggtaacggtgtgatacgtgcttgagttcaatcattcacttgaccgtaacgtaacccaatttcgctgatgccatacgacgccctttctgaagcagaaacatctccaatggaaaacccgctaccgcatccatactttcacttaaagtgaggcagtgtcaatcttgtggcaaattcggtggcacatatcgcgctcccgcaattcttctcagaatcgggtcagtacagcattgccgacgccgggtcagagaggatctccgcaacgtcgtggaggaatgtcgaaccctgctcaccgtcaataagacgatgatcgaacccgaggctcatcgtcgtcacccacctgggcacaacgcgctcgtcatcaccggtcccgacgacccacggccgccgagcgagagcaccgagcacgaggatcgctgactctgtccggttgaccacgggagtaccggcatcgagcccgaacaccccgacgttcgtgatcgagaaggtaccgtcggcatagtcgggcggttgcagtttgtcttccttggcgatcgcaacgatccgggtgatctccgtcgccaactcaagcatcgccatgtcctgggcgtcgcgcaccaccggcaccataaggccgcgaggcgtggcggcggcaatgccgaggttgatgtggtcacggaagacgatctggtcagcggcgtcatcccatgcggcgttgatgatgggggtgcgccccatcgccaggcacaccgccttgcaccacaccgtcagcggggagacacgcaggcctttgaaacgacggtcggcacgcagccggttgaccagctccatcgtcggggtgacgtcgcaggtaaggaaggccgtcacgagggccttcgtatccaaggaatccttcacggccttcgctgtgaccttgcgcaccccacgcactggcaccttgcgggtgtggccgtcgggctcggtcggggcgccaccgaggagacgtcgagacatcaccgacaggctcgccagctcggcgtcgccaggacaagcaccgccgtccccggctgcagcagcgccatgatgagcggccgctttgacgtcactcctcgtcactgcaccctgcggaccggtgccggtcacctgagacaagtcgacgccgaggtctgctgccaatcgtcgggccggcggcttggcaagaatgtgcgcggtgcggtccatgcgcggtgggtcttgacgaggagccggctcggtcagacgctgctccggtttcgcctcggcgtcgtgccgagattccgaaaccgattgctcaggatgagtgtctgcac

SEQ ID NO: 79 - DNA, 2113 bp, Propionibacterium acnes
agcaagcacggcaccaaccgggtgatctttcagttgtgccacggcttgacgatgcttctcgtcgagacggacggcttcggtagcctgcaacgcaccgagcacaacccgctgggacgccttgccccacgcctcgaacacctcgtgtgcagcctccgggtccaccgcgatgttccattcacttgtcggcccggtattgccacgataattgatcgccccacccatgacgtgcagcccccgcaacaaccgcggcaattccggttcttcccgcagcgccagcgcgaggttcgtcaacggcccggtgacgatacccaccaacttccccgggtattggcgcgcgagatcaacccacagttgtgccccgctacgcgaatccgggtgacgcccgcactcccctagcacagcgtgccccaacccgtgcggcccgtgggtctcctcggcggtcatgagaggctcgacgagcggaacgtccgcccctcgggcaaccggcacgcccattccgagcagatcagtcaccccaagcgcgtttcgcagtacgtcgtcctgccccacgttgccggcagtcgtcaccaccccgacggtctcaacgtcgtcacggcaggccacgtaggccagggcgaaggcgtcgtcgatacccggatcgcagtccaacaagacgggcagggagcgcgtagaagtcgacatgtcgccacactaaggcttcgaccgttgtggcgtcaccctccgatgcgtccaccaaacttgtagcgggattcatgaagaagcgccgcggaacagaccgtgctccatccccgcgatgatgaactcaattttgagatcgagattcccgcgctcccccatgtcctgcattccgaatagttcgggtagctctccagcgatcctcacaaacttgtccaatccggtgcgaccttcttcatcacaggtcatgtacggctggaccgacatgtacgtctccaaggccgtgtcccccgcgaagtccagggcgaaggctgccccttccttgcccccggggataccgagtgcggccaacctctcaacgatcgccgtgattcgcggtagagctactccgaaggcttcaggccgggtgacaataacggcggccgcctccggatagcggacacacatctgccactgccgatccacgacatcgcgcagcacgtcctgccaggtgcacaactgcggatccggttcgatgtcggcagctatcgcgctgatcgcggcaagctgcaactcctgacgggaactgaactcccggtacaaggcagtggccttcaccccaaggcgctcggcaaccgctcgaagagtgaaactgccaattccttcagctagggtagcgtcaatgacctgacgtcgtgtgaacgcaggtttacgccccggccgttttctcatcacggccgacccacgagcgaccaccccacagcccgttcccgggcatgccacagatcggcatacaggccgctgctggcaatgaggtcgtcatgggttcccacttgacaaaccctaccagtgcgatcgacgacgactatctgatccgccgaacgaatggtgtcgagcttgtgggcgataacgacgattgtcgacgtctgccgcagctgggtcacagcggcctcgacatgggcctcgttctccgggtccaaagccgaggtggcctcgtcgaaaagcagaatcggggcgcgtttgagcaaggcccgagctaccgacacccgctgacgttcgccacccgaaagccgacgacccccttctccgacgctggcatcccaaccgcccggaagacgatcagcaatctcgtcgacaccggccagggctccggcctgacgcacgtgctcatcggtggcgtccgggcaaccgatgcggatattttccgtcagggtggagtcatagaggtacacatcctgaaacaccatggcaagctgactcatgagctgctcagtagtctgatcgcggacatcgaccccaccaactcgcaccgttccggaatcagcatcccagaacctggcaatgagccgaaacagagtggacttgccagcgcccgagggtccgacgatagccgtcaatccgccggccggaacagtgaacgagacgtcgtggaggaccgggcgagcctggtcgtagccga

SEQ ID NO: 80 - DNA, 11827 bp, Propionibacterium acnes
aggatctcgtcgacctcggcaaccggttcacgcgcggtctcgatggccagggtcgcggcacagacatcctccaacaccttcgtgtagcgcagcgaaaccccgacgaaggccaccgccacgaccgggctcaaccgtcctgatccgcccaggttcgcagcgagcacgatgagggtcacggcaatgccctgggccgccagcccggagacgaaattcgccaacactcctagccacagatccttgcgggcagcacgtccgctggccacctgggcatcatggagaggttgatagccgctggcgcgtccggctgcccgcagtgcaggctgggattcgcagaactcgactattcgggccgccaattcctgctcagtggggtacgtcaacgcttcaccgcgaagtttgagggcgcgtgaggcgatcgtgaggaggtagatggtcggaatggcaaggagcagggccaaccccaactgccatgaccacatccaggccaggaccatcatgacgagggtagtggtcatgcccttcaccagcggagcggtgaagtgtcccaagcactcgcccagcgtcatgagtccacgcgtcaacaggcgcgagagacgggcgggaaaactcggccggaaccaccccagcggcagactggcgacgtgatcaccgatacggatgctgaggtgactcaggatatctatcgcacatagataccccgtgctcgactgaaggtacgacaccacagccccggcagcaaccaggacagcgagcacccacacccaaccccaccaggcaagacccaacgagggctgccccgcaacgaaagcggtgaacgtcgggatgacggcaaacaggccgactccctcgatcgctcctaacacaccggcccacaccaaggagctgtggaaccgccgggtgccctcgctggtcagcaatggttggaacgcccgcaccaggaggatgtccccgacccaggaaagacgtgacgacgtggtgctcatcgggtgactccctccatgattcgtcccgccgacagccgcacccagtagggctgttcggccagttgctcgacggtgccgcaggctgcgatagagccgttctccatgacgcagatgacatcagccccaatcaccgactcggcgtgatgaccgatgaccaacacggttcggcctcgagccaaagcggccagggcctgctggatctcggcctcgcagtctggatcggtggctgcagtcgcctcgtccaggacgaggatcggggcatcggccaacacggcccgcgcaatggacaggcgctgcttctgtccacctgacaagttggtgtcctcacccaggacggtgtcgaaaccggcgggcagggcatcaatgtcgtcgaggattcgagccgtgcgggcagcgtcacgaacctgttgttcggtggcatcgggacgagccaaggtgatgacgtcacggatggattgacgctgcaggtatgggtcctgcaagacgaaggagacgagtcggtaaaggtcggtcgaggggagctccctgaggtctaccccaccgatgcgcaccgtgccgaaatcaggatcacggaatcgggccaacatcgtcgcgagggtcgacttacctgacccagacgggcccacgagggccgtgacggtgcccgggcgcagtgtcaaggagacgtggttgagggccggaacctcgccgtcaggggtgtggtaggagacgctgatgtcgtcaaaggtgaccgtcgtgtcctcgggaatcgcggagctggtaccaggctcgtcgatctgctcgatagacaggacctcttgcagacgcaacgctgcaccaccagcttgctggtacatccacgccgtgcttccaagcacctcgacggtgtgcggcagcacgagggcgatgagggagcaggtgagaacatcggcaacacccacccagccggccctagccatgagtagaccgaagccgaagttgatcgccatgagcgcaggcaccgagatcaccgactgcgatagggcggacgccttaatgagcgggccgcaccagtcccagtaaaaccgggcgaactcctcgcaggtagtggtgaagcgtcggtgggccttgcctgtctgaccgaagttcttgacgacgtggacgccctcggtcaattcgatggcgttggccgagatatcggcaagtttgtcgtccatctcggcggtcttggcggtcatgccccgcatcgaccaccactgcaacagggcatagatcgggaaagtcgctagacagagcagacccaaccgccaatccactatgaaggcgtagacgagcagcaccacggggatgccgatcgccgcagtctgatccaccggggcgtgggcgacaagtgcatgcacctggacggtatcgtcctggatggccttacgcacctgcccggtggatgacgaactgaaccatgccagcggtgcccgggacaggcgcccgatgatgcgaccctgcaagacactgcgcagtttgaggtcagcgaaatgtgtgatgacaagggccagcacgtagagcagggcctgggtgcagaaggccgccaccaacaggttcgcggtatgtacgagggcctcgtggtcgatatgggcgctcagcaggatggtgccgagcttcaccaaggctagataggggggccaaggcgacgacgcaggaggcgatcgataatccgcgccaccaggattcgtccccggatgggttgcataagcgatgagagggctctacccccggcgcggtgcttggcctgatagtcgtgggagctttcggcagatgcagtttcctgggctgccacggaggctggcggcgacggctgggacgggccaacgatggaggcaggatcccccgaggtggttctgctcacttcgtcagtcccgcccgctggaaatgtttgcgccccaccttgatgcccagccaaccaccgagaagtccaagcaggaacaccacgacggcccatccggcgaccagaccgggagtaaacagtgctcgcatcttgttggaataatcggcacccatttgcctggtgatcatggtgtagtactcgtcggcgttcacgaccatcggtatcagtggcacgaccacccagagggtgaatatcgcgtatccgagagacgcccggcgcgggtccaggcggacattgcgcccggcgttggtggtgaccagatcggcgacgaagccgagcacgagcccggcggggatcatccagatagcatgcccgggcgtcataccgagcccgacgagcagcccggtgatcgtcaaggcgcccattttcgggacccgtgccattgacagcatcacgatgatcccgcccagcagaataccgaggatccagccaacgaacataaacgccggcccggcgaaaccaatcatcccgcaggcgtagaaggcgacgaagaaaatcaccgcgaaaatggctacggtcaccagatcacgagtggtcaggcgtgatttcatgatttccctttcaaggtggcgatattgaccagaaagtccccacaccgggccatgagttccgggtcgtgggtaatgacgatgacaaccttcccggcggtggcaagttcaccgacgagatcggcgatcgacgcgagatgccggcgatcgacacccgaggttggttcgtcgaaaacgacgacctccttgtcttgcgcgatggtggccgcgaccacgaggcgttgggcctgcccacccgacaaagacaaggggtggcgatcacgttcgccggccaggtcaaggcgttccagaagtcccggtacgtcggcggcatctcgatgcggaagatccagcccgagggtgacttcacgttctaccgactcactgaaaagctgacggcgaacgtcctgcatcaccatcccgcaacatttctgacgcctgccgggggtccagggcactcccatgccgatgcgagcttcgggaggggatttttcgagcccgcacacgattcgggccaaagtcgacttccccgcgccattcgagccggtcagaatcgtcaccgccccgccaggcaggaacagagaatcgatgtcgagaatcgtcgagccggtacggtaagagaaggtgaggtgctcgatggtcagccctgccgggattttcgtgcagctgactgaggcgggatcggagcgcatgaacttgcctcggggcaccggagtaagcggagctggagcctgcggtggcgccggcaggtcgaccgagttgacgtcgagactgcgcaggccccgttctagcaagtccccctctgtcagcgcgaaaaggctgctgccgctcattcgctcaacgatctggccattggaaacacgatgcacgtcgtcaacgagtccgcggaacagatgcagccggtgctcagcgatcacgagggtcttgttggcagctttgagctcggtgacgagagcgcgaaaatcttcgatcccctcagccgagaggttcgaggttggttcatcgaaaagaagcaggtcgacatcagccaccagcgcgcaggcgcaggcgacccgctgaagttctcctcctgaaagagtgtcgaggtggcggtcgagcaggtgagagataccggttcgggaaaccgcacgggagacagcttcgcggatatcaaccggatcgaccccatagttctccagcccgaaggccagctcggtgcgcacgctggaggtgaagaactgagtgcggggattctggaaaatcatcgcggaggtgcggccgacattgtgcagttcgacactggccaggtcagtaccttggaccatgacgtggccgcgcaactttcccccgaagaattgggggacgagtccattcatcgtccgcaatagggtggatttccctgaccccgacgctcccaccagcagggtgagggtgcctggttggatcgtcatcgtgatgtcacgaagctgttctacgaactcccgctcgggggccgggccgtcggagaacggcgaggagtcggggtcgaacgaggggtagccgtagctgacgccgttgaggctgacgatgctcacacgatcacctcgctggcacgccacacaaccaacgcgaccaaaatcgtcagcacgagggcgtcgccgacgcgaaaacgactcgactgggtgttcgatcgggatttttgtgcaccgagtcctttgatgatggcggctgcggaaagctcgtcgacgatgcgggcagccgaggccaggaagggaatgacgacgtactcacccgtacgtatcgggtgacgcacagccgaccgcgccccagggttgaggccgcgcagggtcatggcctggacgattgctcgcagctcgcgtactgccatcgggaagaaccgaaccaccaccatgacgggcacataaatgacgcgcggagcatgcaattgggtgaggaccgcgccgacccgagtgacgtcgaggactttgatcgccgctactgccgcaccaaagactccggcgaaccgaaacatccagaaggcgatgaagaccaggaacgccgatactgtcgagcgccacagcactgggagtaggaagcagcagaaaatccacaccagcacgaagatcgtccagcttatccaggacttcgaccgggtagtcaagaccaagaacacccacatcactccaagactggtcatcacgaggactgttgatcctgctcccataagtaggacgttgagaacgatgacgtagagggcgagggtgcgtggatccaccgtgccgaagagctgccgagatcagcgagtgtggaccgccgaagcagtatcgaaacctatcccagcaaccgagcgactatgaggaacgcggtgagtggctccgggcagcgccagggtcgcctcatcatgtttcataaggtaaccctatctcataactgattactgttaacaaatacttcctctcccgctttgacccggagttggccatgacggcgccatatgagctccctgccaccacgtgaggcacgatggaagggccgacgaccaattaccgaagaacaggtgtgagcatgactgacgtggagaagtcctcgactcgcggtgagaggattctcgccgctgtggtcgccttcaccctctggatggccgtgatattcgcgattgtggcgatcttcgtcggctggcggtggtcgctgcggatgttcgtcggggtgctcctcatcggtatccccggagagatcgttatggagctcgtcggccggggaccgttgctgccgagcggcgcgtcgagaatacggcgttcccgtggttcgcggttactcctctcggcactcatcctcatcgcgtgggcgttcatcgttctcgcggcgattgcgctcatacagccctggtacggcgctaccggtgacatggcctgggtgatggtcgtagggatcgcggcgatcctcgtgcaggagggcatcgacacccgcaagaagaagtcctagtcttcgatcatctctcatgaaggacttgtcggctcctcgcatacaagggggtcgatagtggtggccggaacgtgcgggttcgatctcgccacaatcatggataccgccagccttggtgtccgtccctgccacaaagcatcacaaaagcattggtgtacacatcagcatcgctgctgcggttgatcgtgaggccacctgagaccattcagggcaggctcacccattcccttccgatttacacctcgtgcgacctcgcaccgcctacaatttcagagcaacgacgcctcatccccgccgccatagtcaggaaaacactgatgatgcccagggtccgcccgtgacgaagaagagctccctcgtcctggcgatggcgtccatcggtgccatcgctgttgggctgaccgggcgtgctcgtcagctcaccctcgccttcaactccgcgagttgggtcgtcgccgtcatcgcgctgagctatctcatccgctccgggcacagccagaaagcagcatggctggcccaaccaccgagggtgcccgaggcacagccgccaggcggttgacggtctcctcgacgtgcattctcacaccatcgcacggcgaacatccaccgatccgctgcccaagcacggctaccctggaactcagttgagtgagaggagacccgcgtgggcatcggaagcaacatcggcaaggcactgttggcccaagcccccgacatggcacccggcgcagctgtctcactactacgcagcatcctcggattcgctatcgacggcgcctcaggactgccgggagcacgtcaggctgccggcaagacgctcaccaagcacgagggcgatgttgagcaggcgatcagctccttagtcaatcagcacattgcgatggccggggcccaggggttcgtctccaacctcggtggcgtcatcactctggccgtgactatccccgccaatatctccggcgttgcgatcgtgcaagcccgcatggtggctgccatcgcccacctgcgcgggtacgatctcgacgaccagcgggtccgcaccgcgatcctcgccactctcatgggtcagcgcgaggtcgatagcctcatccacgaggagaagctaccgacgacaccgatgggcatcgctaccgctccggtcggtgacgccgatctcgaaaaggtcgtcgcccggaacctcgtcaatgtcctcatggggcaggtcgcgggcaagaagctgcctgtgttcgtctccaagcgcgttcctgtacttggcggcggagtcggtgccaccgctgacggattcaccacgtggagcgtggcccgctacgcccgtaagcaattccccacccgccgcccgcgcacctgagacccgcacgctcgggatacggccaggataattcggggcaggaatagtggcgtccgaccacagtgacgggatgtggccgggattcaacgacgcaaggatttcaccccacccagcccccatgcgtacccgacaacccctaggaaggcacaaacgacggcacacaccatggccgtggtagacactgtcggcgcactcccctcgacggcggccgtttttcctggatagccgccggggaggaatcgcaggagggtgttcgactgcgcgacgaccacaaccaggtagatcaggggaccgcacaatggcccgactcgccgcgacaccattcccgtgacgaacaatgcgataccggtacacagcacgcaagtcaccgagaaccctatgaatggcggccacggcagctgaaaccgtgcgggaatttgcggtaccaggacggaatcaccatcaggtatcaactcaacgggcaacgatcgcagtacccatcctatgagcaatggaagaccagctgcacagccgcatatccacagccccatccacgcatatccaaccgtgagggaccgaaccgatgtcctctcgacccaatccatggccgatgagacacaccacatgatggtggcacaacccaccagaatgatcagctcgggaccagtcacagggcgatcccacacgtctcccggcgccaccgacagactcgccttccacaggaagaaggccacgagcaaggccacaagcggcgcaatgacaagggcaatagcatggcgccccttcaggaaagtcgctacgcctctcatcggtgaagatcactggaggtcaatgaacacgtgcttaccgcatgatgatgcgccgtataccaatgacggaatgcggttacatccatgccgtcaaggccatttcgttccaaactcgtcgcatcatcatgctgaaatccagccagccgaagaatggtacgttccacggaatcgacgccattgagggccccatctgctgagatgtcaactccgaccctccggtctcacgcataaaagcacatgcgtcccggcctgaaaatgattgagccagcccctcacccgtcagatccgacatttgttgtctagagccatatgaggtcggtcggccgagatcaatcacacgttgcccctgtatgcttggtacccagactcagcaagcaggacgtcacgggaaaccaccgtttgcggcaggacagacaagacgcgttgagcgggtttcgcgtaggacgccgcgagactccgatgtgctggcgtgacgcatacccgcacgccttcgtgcgacgaacactcaaaggctagtggcgcatcacgaaacaacggcaccggcaagacgacgcccacggcagcaatgatgagcggtggggcgatcaaggccacacaaggcatcactcgacgccagcagaacctgtcggcacggaccctggaccaacgactggcggtgaggatacaggacaaggtgacgatgcagaagaagatggcgcgcatgaccacggccgcgaccgtgacggtgtgggtgccacccggttccgacattcccaaagaccatgcaaaggccaccgagccatgccccgtgttggcaaggagatttccgttgacgacgatcggcatttcgaccaggacgatacacacaacaggtaccaccagccacacgatggggtgggacaccatcgcggccacgaggtgagcaacggccaccaaagccgcgaatgacagcaggacgacgattaagtcggaggcttcggcgacggtcggagtcgcattgagccacgtcttagcgaccagcggggccgccacgatgaccgtcccgatgaggagggcagtcgtctgccgccagaaccagtgccagtggatgccaagaatggaccgcgccggagcaacccccacaaccatgtccgaaggtgccgtgcgtgccgctaggcccacccccatgaggccagccacgataccccacagcatactggactcccggagcgtgacggcgacatcctgcacttgccacaacccccaagcccatcgacctcgcaacgcaatgaagctgcacatggctcctccgaccgtcacgagaaccatgtgccatgacgtgaaggggaatgccatgcggtgaaaaccgcgcagcggacgtataccctgaagcgaggtgagcatcacgctgcgccccccgagaagagtgaggtatccagcctcagcatcgttggtattacggactgggtgccctcggccaacagattccagttcggaatacgagccctcgaagatcagctttccctcggacaggacgacgagttgcgacacgaagccctggagatcctcaagcaggtgagtcgacacaatgaccgtccgatcttcggcgagctcaccgaagagggatcgcaccccgatccttgatgccgggtcgaggcctaccgtcggctcatcaagcagtagtacagccggatcgccgacaatcgcacacgcgattccaagtcgttgacgcattccacccgaaagagactggacgcgctcatcggcacggtcaagaagcccaacacgatcgagggctgcacatgccctcgcacggcattcgctcggttcaacgcctcgcgcccaggccgcatattccacggcccgccggatgcggaagtgcgacgggagggaaaaccgctggggcaggaatccgaccaaaccacggatggtgtcgacgtcatcgctgacatcgacaccattcacccgaaagtggccggactccggttcacggagtgtcgcgagaatactgagaagtgtcgactttccggccccatttggaccgagcagcccccacaaaccagagccaaactcacaggaaatatcaacaaggctacgccgatggtggtaacggtgtgatacgtgctcgagttcaatcattcacttagccgtaacgtaacccgatttcgcggatgccatacgacgtcctttctgcagcagaaacatctccaatggaaaacccgctaccgtacccatactttcacttagagtaaggcagtaccaaccttgcggcaaattcggcggtacctaccgcgctcccacaattcttctcagaatcgggtcagtacagcattgccgacgccgggtccgaaaggatctccgcaacgtcgtggaggaatgtcgaaccctgctcaccgtcaataagacgatgatcgaacccgaggctcatcgtcgtcacccacctgggcacaacgcgctcgtcgtcaccggtcccgacgacccacggccgccgagcgagagcaccaagcacgaggatcgctgactctgtccggttgaccacgggagtgccggcatcaagcccgaacaccccgacgttcgtgatcgagaaggtaccgtcggcatagtcgggcgattgcagtttgtcctctttggcgatcgcaacgatccgggtgatctccgtcgccaactcaagcatcgtcatgtcctgggcgtcgcgcaccaccggcaccatgaggccgcgcggcgtggcggcggcaatgccgaggttgatgtggtcacggaagacgatctggtcggtggcgtcatcccatgcggcgttgatgatgggggtgcgccccatcgccaggcacaccgccttgcaccacaccgtcagcggggagacacgcaggcccttgaaacgacggtcggcacgcagccggttgaccagctccatcgtcggggtgacgtcgcaggtgaggaaggccgtcacgagggccttcgtatccaaggactccttcacggccttcgctgtgaccttgcgcaccccacgcactggcaccttgcgggtgtggccgtcgggctcggtcggggcgccaccgaggagacgccgagacatcaccgacaggtttgccagctcggcgtcaccacaagaagcgccggcgtccccggctgcagcagcgccatcatgagcggccgctttgacgtcactcctcgtcactgcaccctgcggaccggtgccggtcacctgggacaggtcgatgccgaggtctgctgccaatcgtcgggccggcggcttggcaaggatgtgcgcggtgcggtccatgcgcggtgggtcttgacgagaagccgactcggttagacgctgctccggtttcgcctcggcgtcgtgttgaggttccgaaaccgattgctcaggatgagtgtct

SEQ ID NO: 81 - DNA, 2055 bp, Propionibacterium acnes
ctcgtcgagacggatgacctcggtagcctgcagcgcccctaacacaactcgctgcgacgcctcaccccatgctttgaacacctcgtggccggcctccgggtccaccgcgatgttccactcgctcgtcggcccggtgttgccacgatgattgatcgccccacccatgacgtgcagcccccgcaacaaccgcggcaattccggttcttcccgcagcgccagcgcgaggttcgtcaacggcccggtgacgatacccaccaacttccccgggtattggcgcgcgagatcaacccacagttgtgccccgctacgcgaatccgggtgacgcccgcactcccttagcacagcgtgccccaacccgtgcggcccgtgggtctcctcggcggtcatgagaggctcgacgagcggaacgtccgcccctcgggcaaccggcacgtccattccgagcagatcagtcaacccaagcgcgtttcgcagtacgtcgtcctgccccacgttgccggcagtcgtcaccaccccgacggtctcaacgtcgtcacggcaggccaggtaggccagagcgaaggcgtcgtcgatacccggatcgcagtccaataagacgggcagggagcgcgtagaggtcggcatgtcgccacactaaggcttcgaccgttgaggcgtcaccctccgatgagtccaccaaacttgtagcgggattcatgaaaaacgccggggaacagaccgtgctccatccccgcgatgatgaactcaattttaagatcgagattcccgcgctcccccatgtcctgcattccgaatagttcgggcagctctccagcgatcctcacaaatttgtccaatccggtgcgaccttcttcatcacaggtcatgtacggctggaccgacatgtacgtctccaaggccgtgtcccccgcgaaatccagggcgaaggctgccccttccttgcccccggggataccgagtgcggccaacctctcaacgatcgccgtgattcgcggcagagctactccgaaggcttcaggccgggtgacgataacggcggccgcctccgaatagcggacacacatctgccactgccgatccacgacatcgcgcagcacgtcctgccaggtgcacaactgcggatccggttcgatgtcggcagctatcgcgctgatcgcggcaagctgcaactcctgacgggaactgaactcccggtacaaggcagtggccttcactccaaggcgctcagcaaccgctcgaagagtgaaactgccaattccttcagctagagtcgcgtcaatgacctgacgtcgtgtgaacgcaggtttacgccccggccgttttctcatcacggccgacccacgagcgaccaccccacagcccgttcccgggcatgccacagatcggcatacaggccgctgctggcaatgaggtcgtcatgggttcccacttgacaaaccctaccagtgcgatcgacgacgactatctgatctgcggaacgaatggtgtcgagcttgtgggcgataacgacaattgtcgatgtctgtcgcagctgggtcacagcggcctcgacatgggcctcgttctccggatccaaggccgaggtggcctcgtcgaaaagcagaatcggggcgcgtttgagcaaggcccgagctaccgacacccgctgacgttcgccacccgaaagccgacgacccccttctccgacgctggcatcccagccgcccggaagacgatcagcaatctcgtcgacaccggccagggctccggcctgacgcacgtgctcatcggtagcgtccgggcaaccgatgcggatattttccgtcagggtggagtcatagaggtacacatcctgaaacaccatggcaagctgactcatgagctgttcggtagtctgatcgcggacatcgaccccaccaactcgcaccgttccggaattagcatcccagaacctggcaatgagccggaacagggtggacttgccagcgcccgaggggccgacgatagccatcagtccgccggccggaacagtgaacgagacatcgtggaggaccgggcgagccggatcgtagccga

SEQ ID NO: 82 - DNA, 6363 bp, Propionibacterium acnes; identical to SEQ ID NO: 29

SEQ ID NO: 83 - DNA, 6363 bp, Propionibacterium acnes
gtgttgtggactctcggggtcagtctgtccgctcacttgagatggcttaacatttctgaccgacgccgaagtctacgaacgctgcgaaacgccaaccgacgcctttgcaaccaagccttcttcatcaagatctacatcgacgaagacgaccaactccgcgtcgagaacaaccgacctttcgaaatgctcctcgaccctcagatcaacgccaacgccctcacctgggcccagaacggcaacaaggcccgaatcgaaactaaggggttcgagccttgtgcgtggggttacttagacgttcattttgatacaaggatctgggtgggtgcacggaggggctaggtgggtgcattgcatcctgacaggagcgccgggtgagttctggttgactaccagcagcgtgttcggtatgctagaggatagttacgcgacagcgtccgttccaatttctgggagtgtgttaattccgatggtgctgtgatctccgttcggctacgccgagaagcgtccaaatgtttcgacggttttggggatcaatatgtctgctatcgaggtaatcaatctttctttttcattttccgctcagccactcttggataacgtttcattcagcgttggcgatagcgagcgcgcagtacttgtggggcctaatggctctggcaaaaccactctcctgcgcctgatacgaggagagctaaccccggatcgaggacatatcgccatcagtgatgcaggagatgcaggttcttgtcgcttcccttatgttcgtgacgccactggcacagttcaggactatctggacgacgtgttggctggcccatgggagttgctcactcgcttcgaccacgtgacgaagcaactatcggctgcccaaagttcagcgagtctcgctaaagagtacgatcacatactcaccagtcttactctggccgacgtatggtcgctcgaagctcgaatcgatgaagtgttagccggtttaggtctaggccagctgaccggacgcggtcgacagcgcgcactcggctcactctcccctggccaggcagtgcggctcgaactggcaggcatcattatggtcagaccagtaactctggtcttggatgaacccaccaatcatcttgatgacgaagccgtaggctttctgatccagcaaataacagattggccggggccagtgctcatggccagtcataatcgtgcgtttattgaagagacagccacggtcatctatgacctcgatattgccccgtggcaggctttggccacagctgaaggagaggctgtgtctggcgtgtaccggtgcactggcgcctatagtgattatcttggcgccaaacaacacgcccgcatggagcatcaaaagcttcacgccacccagcaatctgaaaaacgcgcgattcgaagtcatcgccgtcgtagcgaagatatcgctcgtggtggagtgaaattagcgaaggcgcagggcatggcacgtaagttcttctctgaccgggcagaaaagaccgcgctgcgacgcacgcgtaacgacgatcaacgcttacacgatcttgctgaacatgaggtgcgaaaaccccgcaactaccaacttaagctcaaccttccaccagtcggctcgcgtggcgggttagccgtcacggcacgaagcgccttcattccaggcaggcttctcccaatcacgttcgaccttgccacgggggaacatttaatactgactggcccgaatggagcggggaaaaccacgctcttgaattggcttgctagtgggaaaacaacaatcgaccctagatccgaagccagcggcactatctctgtcagcgggcggcttgcttacgtcccacagcgcctaccacgcacaggagattcctactttcacccagaacattggaaagacgggatcagagaacttggcacgggaatactccacccatccatgtgggccaccccagtcggccaactttcagatggaaaccagcgtcgagcccagatcgcgttagccgtggcgcagaaacccgagattcttgtcattgacgaaccaaccaactacctcgacctcgccacgcttgaagaactagaggacgcgctacgccaatggaacggcacactcatcatcgccagtcacgaccgctggcttatcaaccactggcagggaacacaaatcgaattatgccccacagatccagcgcccggatcaccgaatcccctcttactcgttaagagccggttcgagccgtggtagtgccgtccttgagtgtgagtttgatagcgccgtcgtggttgacggtggtgtgatcgacgagggtgttccaggcttggtcggagtattcgagtggtggttgggtggcaaggtagtcgcgtacttcgattgcttgtgctcggcggtggcgcagatcgtcgatctggtcgctgatccgttgatgctcggcctcaagttggtggtgccgatcttcaagctcgtggtaacggcggtcgtagtcgtcagggtcgtgggcggtcgtggctgcggggtgatgagttggttcatcagcgtgatggtttcttcgatccgctcccccagcgtggcctgcttggtttcgagctcgcgggtgtcgtagacggtttcgtcgagcaggcgcatggtgtcatcgagcacgtcgttgccggtgacccgcttagccagggctgcgacgaaggcgtctttgatctggtcttcggtgacgtggggtgtcgcgcagtgatgatccttgttgtatttgttgttgcagcgccagatgtagcggcggtatttgctggtggagtgccagactttccgcccaaacctcccgccgcaatcggagcaggtgatcgtgttggcgaaggggtgggtgttggaggtgcctttgcctgcgcggcgggcgagttctgcttggacggtgtcccaggtgacgggatcaatgatgggttcgtggttgctggtgacgtagtactggggtacttcgccttcgttgattttcatggtttggttaggaagtcggtggtgaagctcttttgcagcagcgcgtcgcctttgtatttctcgttggcaaggatcgaccgcacagtggagggcgaccagatttgtttgccacgcggggtggggatgccatcggatgtgaattctttggcgatggtttgtggggttgcgccttcgaggaagcgggcataaatacgacggacggttggtgcttgggtttcgtcgatggcgaggttgccgtcttcgcctttcttgtagccgagcagggacgcgtaggacaccatgattttcccgtcggcgaagcgtttacggtggtcccaggtgacattctcggaaatggagcgggattcttcttgggtgaggctggacatgatggtgatgagtagttcgcctttggaatcgagtgtccagatgttttctttttcgaagtagacctctacgcctttgtctttgagctggcggacgtggatgagggtgtcgacggtgttgcgggcgaaccgggacacgctcttggtgaggatcaaatcgatttttccggcgagggtgtcggcgatcatggttttgaagccttcacggtgtttggtgctggtgccagtgatgccttcgtcggcgtacatgcctgcgaattcccactctgtgcgggattggatgtggctcgtgtagtagtcgatttgtgcctcgtaggaggaggcttgttcttccatctcggtggatacccgcgcgtaggccgctaccctgcgccgacgccgagtaccctgcaccgtggtgtgtccgggtatttttgtggctgggatcgcggtgacacgcttgttccgaatctgcttggtggtcatatcgcactttcctcgtccaggctcaccgccactggcacttcgccgctaatggtgtggatggtgagcgtacgatcgggattgacaacgattttcacgaggcgcgtcagcgcatactcgtcgtcccagtcgtcgaggccaagcacgcgggtgcagatctgggtgagatgggtttctcggatttgtggtgcctggcagggattgcctttacctttggtggcggtttcgcaccaccaaaacttgtaggacgtgtggcggcgtgtcttggtgcggcggtgataaaacctgctacagacagagcattcaatccgagaggtgagcccggtcgttctagctgacggcgtggctccacgtccgagatgtctgcgccgggcgagctcggcctggacggcgccgaacgtggtctggtcgatgatgggcgggtgggattcgtcgacgaggtagcgtggcagctcgccggtgttggtatggcagttcaattctgcaacgtttggccggtaatacttttgcaggattacgcggccggtgtagatttcattttcgagccatttgcggatcgtcttaccgcgaaacttggctccccgcctaggcttgaccccttcagcattcaactgactgatgatcttggcttcagtctcgatgatagccaagtcactacccacgtattggtagccgtagggttggcgcgaatgcatgagcccgtcggcgtatttcttccttatcccccatttaacattcttcgacatggatcgagattcctcctgcgcaaacgatgccagcagggtcagcaggagttcaccgtcagcggtcgcggtatcgatctgttcacgctcgaaacgcactgagacgccgaggattttgagttcgcggacggcatcgagcaggtcgacggtgttgcgagtcagcctggatatcgacttcgtcaaaatcatgtcgatgtcgccggagcgggcggcggccatcatggtctggaacccctctcgacggacggtactggtgccggtgatgccttcgtcgatgaacacgcctgcatagtcccaaccaggggtggattgaatcagatgagagtagtacgacacctgggcggcaatcgaagatagctggcgttcgtgctcggtcgatacccgcgcataccctgctactcgtagccgacgtggcgtggcgggtctaggtgggataactcgaaaactacgcgaggtcactccctgcttctctttcttctatggcgacaggtgttttggttgtatccatctacgctctaaacctgagtcttatccagtcgaacctgcagcaacaatgcccccactggcgcggttgcttcatgcccgatccgcgtaaggatcacgtggctttcgtttggggtgagtgcgccggtttcggtgagccgatcaataaaggcgacctggcgggcaagatcgacttcggcattgaacatggcacccgtcacggtctgccacctcgggtgctgaagcggtgcctgatatagcaggcatgcgagcaatacttacggtgcttgtttccgtaggcctcgaagctctcaccgcaagcaacgcaggtgaaggtgtatattgcccgccggttgagccgttcggggtgggcgtgctaccacgacaaacgacacacatccgaacagaacctttgccccgccaccgcagcttcaaaatgcccattacagtgttcgcatgccttagcaggctcaacatcaaccgccggatcgatgttgatgtcagctctgcgacagatcgacttcaccgtattgcgcgacatgcccaatctggtggcgatctgcccatacgatgcgcctcggcatcgcagctccacaactcgctcacgggtaatctcacgtgccatgacgcgctcctgctcaatagaaataaggtctctactgacagggcttcgacccaccccgatttataaccaccactgtcctggtgcgatgggaacaaaaatggccccgccaccacctcatgtagtgaggcagcgacggggcgaaacaggacagttttcatgagtcttggtttagtggcggagtttttcgttgacccggcgctggacggcgtcgtagttggatccgagtctgcgtcggcgttcgttgccgttgccgtattcgccgcggatgaccgcgtcagcgagcgcgtcaatgttcggtgccggcttcggtgtgggtgcgggtttcggtgccggcgcgggtgcgggcgtgttgccggtcatgtggtcgtaccagtactgggcgcgagccatataggcggcgtgctgagtaccggccagcgatgctgggcattcggtggctgagaagtttttgtgcccgaacacgttcttaccccaggtagggcggccgagcttgtaataccgacagatcgcggccaccaaatgtgcgccgttgtcgaggcaggcgtcagagattttccatgggttagaagaggcgtcggcgtgctcgataccaatgctggtggtattggctgcccagtttccggcgtgccaggcggtgtcgcggtcccacacgagctgcccgatccgcccggaggtttctacctggtagtgggcggaggcgggccgggtctgccacac

SEQ ID NO: 84 - DNA, 6363 bp, Propionibacterium acnes; identical to SEQ ID NO: 83

SEQ ID NO: 85 - DNA, 6363 bp, Propionibacterium acnes; identical to SEQ ID NO: 83

SEQ ID NO: 86 - DNA, 6363 bp, Propionibacterium acnes; identical to SEQ ID NO: 83

SEQ ID NO: 87 - DNA, 6363 bp, Propionibacterium acnes; identical to SEQ ID NO: 83

SEQ ID NO: 88 - DNA, 6363 bp, Propionibacterium acnes; identical to SEQ ID NO: 83

SEQ ID NO: 89 - DNA, 6363 bp, Propionibacterium acnes; identical to SEQ ID NO: 83

SEQ ID NO: 90 - DNA, 6363 bp, Propionibacterium acnes; identical to SEQ ID NO: 83

SEQ ID NO: 91 - DNA, 6363 bp, Propionibacterium acnes; identical to SEQ ID NO: 83

SEQ ID NO: 92 - DNA, 6363 bp, Propionibacterium acnes; identical to SEQ ID NO: 83

SEQ ID NO: 93 - DNA, 6363 bp, Propionibacterium acnes
gtgttgtggactctcggggtcagtctgtccgctcacttgagatggcttaacatttctgaccgacgccgaagtctacgaacgctgcgaaacgccaaccgacgcctttgcaaccaagccttcttcatcaagatctacatcgacgaagacgaccaactccgcgtcgagaacaaccgacctttcgaaatgctcctcgaccctcagatcaacgccaacgccctcacctgggcccagaacggcaacaaggcccgaatcgaaactaaggggttcgagccttgtgcgtggggttacttagacgttcattttgatacaaggatctgggtgggtgcacggaggggctaggtgggtgcattgcatcctgacaggagcgccgggtgagttctggttgactaccagcagcgtgttcggtatgctagaggatagttacgcgacagcgtccgttccaatttctgggagtgtgttaattccgatggtgctgtgatctccgttcggctacgccgagaagcgtccaaatgtttcgacggttttggggatcaatatgtctgctatcgaggtaatcaatctttctttttcattttccgctcagccactcttggataacgtttcattcagcgttggcgatagcgagcgcgcagtacttgtggggcctaatggctctggcaaaaccactctcctgcgcctgatacgaggagagctaaccccggatcgaggacatatcgccatcagtgatgcaggagatgcaggttcttgtcgcttcccttatgttcgtgacgccactggcacagttcaggactatctggacgacgtgttggctggcccatgggagttgctcactcgcttcgaccacgtgacgaagcaactatcggctgcccaaagttcagcgagtctcgctaaagagtacgatcacatactcaccagtcttactctggccgacgtatggtcgctcgaagctcgaatcgatgaagtgttagccggtttaggtctaggccagctgaccggacgcggtcgacagcgcgcactcggctcactctcccctggccaggcagtgcggctcgaactggcaggcatcattatggtcagaccagtaactctggtcttggatgaacccaccaatcatcttgatgacgaagccgtaggctttctgatccagcaaataacagattggccggggccagtgctcatggccagtcataatcgtgcgtttattgaagagacagccacggtcatctatgacctcgatattgccccgtggcaggctttggccacagctgaaggagaggctgtgtctggcgtgtaccggtgcactggcgcctatagtgattatcttggcgccaaacaacacgcccgcatggagcatcaaaagcttcacgccacccagcaatctgaaaaacgcgcgattcgaagtcatcgccgtcgtagcgaagatatcgctcgtggtggagtgaaattagcgaaggcgcagggcatggcacgtaagttcttctctgaccgggcagaaaagaccgcgctgcgacgcacgcgtaacgacgatcaacgcttacacgatcttgctgaacatgaggtgcgaaaaccccgcaactaccaacttaagctcaaccttccaccagtcggctcgcgtggcgggttagccgtcacggcacgaagcgccttcattccaggcaggcttctcccaatcacgttcgaccttgccacgggggaacatttaatactgactggcccgaatggagcggggaaaaccacgctcttgaattggcttgctagtgggaaaacaacaatcgaccctagatccgaagccagcggcactatctctgtcagcgggcggcttgcttacgtcccacagcgcctaccacgcacaggagattcctactttcacccagaacattggaaagacgggatcagagaacttggcacgggaatactccacccatccatgtgggccaccccagtcggccaactttcagatggaaaccagcgtcgagcccagatcgcgttagccgtggcgcagaaacccgagattcttgtcattgacgaaccaaccaactacctcgacctcgccacgcttgaagaactagaggacgcgctacgccaatggaacggcacactcatcatcgccagtcacgaccgctggcttatcaaccactggcagggaacacaaatcgaattatgccccacagatccagcgcccggatcaccgaatcccctcttactcgttaagagccggttcgagccgtggtagtgccgtccttgagtgtgagtttgatagcgccgtcgtggttgacggtggtgtgatcgacgagggtgttccaggcttggtcggagtattcgagtggtggttgggtggcaaggtagtcgcgtacttcgattgcttgtgctcggcggtggcgcagatcgtcgatctggtcgctgatccgttgatgctcggcctcaagttggtggtgccgatcttcaagctcgtggtaacggcggtcgtagtcgtcagggtcgtgggcggtcgtggctgcggggtgatgagttggttcatcagcgtgatggtttcttcgatccgctcccccagcgtggcctgcttggtttcgagctcgcgggtgtcgtagacggtttcgtcgagcaggcgcatggtgtcatcgagcacgtcgttgccggtgacccgcttagccagggctgcgacgaaggcgtctttgatctggtcttcggtgacgtggggtgtcgcgcagtgatgatccttgttgtatttgttgttgcagcgccagatgtagcggcggtatttgctggtggagtgccagactttccgcccaaacctcccgccgcaatcggagcaggtgatcgtgttggcgaaggggtgggtgttggaggtgcctttgcctgcgcggcgggcgagttctgcttggacggtgtcccaggtgacgggatcaatgatgggttcgtggttgctggtgacgtagtactggggtacttcgccttcgttgattttcatggtttggttaggaagtcggtggtgaagctcttttgcagcagcgcgtcgcctttgtatttctcgttggcaaggatcgaccgcacagtggagggcgaccagatttgtttgccacgcggggtggggatgccatcggatgtgaattctttggcgatggtttgtggggttgcgccttcgaggaagcgggcataaatacgacggacggttggtgcttgggtttcgtcgatggcgaggttgccgtcttcgcctttcttgtagccgagcagggacgcgtaggacaccatgattttcccgtcggcgaagcgtttacggtggtcccaggtgacattctcggaaatggagcgggattcttcttgggtgaggctggacatgatggtgatgagtagttcgcctttggaatcgagtgtccagatgttttctttttcgaagtagacctctacgcctttgtctttgagctggcggacgtggatgagggtgtcgacggtgttgcgggcgaaccgggacacgctcttggtgaggatcaaatcgatttttccggcgagggtgtcggcgatcatggttttgaagccttcacggtgtttggtgctggtgccagtgatgccttcgtcggcgtacatgcctgcgaattcccactctgtgcgggattggatgtggctcgtgtagtagtcgatttgtgcctcgtaggaggaggcttgttcttccatctcggtggatacccgcgcgtaggccgctaccctgcgccgacgccgagtaccctgcaccgtggtgtgtccgggtatttttgtggctgggatcgcggtgacacgcttgttccgaatctgcttggtggtcatatcgcactttcctcgtccaggctcaccgccactggcacttcgccgctaatggtgtggatggtgagcgtacgatcgggattgacaacgattttcacgaggcgcgtcagcgcatactcgtcgtcccagtcgtcgaggccaagcacgcgggtgcagatctgggtgagatgggtttctcggatttgtggtgcctggcagggattgcctttacctttggtggcggtttcgcaccaccaaaacttgtaggacgtgtggcggcgtgtcttggtgcggcggtgataaaacctgctacagacagagcattcaatccgagaggtgagcccggtcgttctagctgacggcgtggctccacgtccgagatgtctgcgccgggcgagctcggcctggacggcgccgaacgtggtctggtcgatgatgggcgggtgggattcgtcgacgaggtagcgtggcagctcgccggtgttggtatggcagttcaattctgcaacgtttggccggtaatacttttgcaggattacgcggccggtgtagatttcattttcgagccatttgcggatcgtcttaccgcgaaacttggctccccgcctaggcttgaccccttcagcattcaactgactgatgatcttggcttcagtctcgatgatagccaagtcactacccacgtattggtagccgtagggttggcgcgaatgcatgagcccgtcggcgtatttcttccttatcccccatttaacattcttcgacatggatcgagattcctcctgcgcaaacgatgccagcagggtcagcaggagttcaccgtcagcggtcgcggtatcgatctgttcacgctcgaaacgcactgagacgccgaggattttgagttcgcggacggcatcgagcaggtcgacggtgttgcgagtcagcctggatatcgacttcgtcaaaatcatgtcgatgtcgccggagcgggcggcggccatcatggtctggaacccctctcgacggacggtactggtgccggtgatgccttcgtcgatgaacacgcctgcatagtcccaaccaggggtggattgaatcagatgagagtagtacgacacctgggcggcaatcgaagatagctggcgttcgtgctcggtcgatacccgcgcataccctgctactcgtagccgacgtggcgtggcggggctaggtgggataactcgaaaactacgcgaggtcactccctgcttctctttcttctatggcgacaggtgttttggttgtatccatctacgctctaaacctgagtcttatccagtcgaacctgcagcaacaatgcccccactggcgcggttgcttcatgcccgatccgcgtaaggatcacgtggctttcgtttggggtgagtgcgccggtttcggtgagccgatcaataaaggcgacctggcgggcaagatcgacttcggcattgaacatggcacccgtcacggtctgccacctcgggtgctgaagcggtgcctgatatagcaggcatgcgagcaatacttacggtgcttgtttccgtaggcctcgaagctctcaccgcaagcaacgcaggtgaaggtgtatattgcccgccggttgagccgttcggggtgggcgtgctaccacgacaaacgacacacatccgaacagaacctttgccccgccaccgcagcttcaaaatgcccattacagtgttcgcatgccttagcaggctcaacatcaaccgccggatcgatgttgatgtcagctctgcgacagatcgacttcaccgtattgcgcgacatgcccaatctggtggcgatctgcccatacgatgcgcctcggcatcgcagctccacaactcgctcacgggtaatctcacgtgccatgacgcgctcctgctcaatagaaataaggtctctactgacagggcttcgacccaccccgatttataaccaccactgtcctggtgcgatgggaacaaaaatggccccgccaccacctcatgtagtgaggcagcgacggggcgaaacaggacagttttcatgagtcttggtttagtggcggagtttttcgttgacccggcgctggacggcgtcgtagttggatccgagtctgcgtcggcgttcgttgccgttgccgtattcgccgcggatgaccgcgtcagcgagcgcgtcaatgttcggtgccggcttcggtgtgggtgcgggtttcggtgccggcgcgggtgcgggcgtgttgccggtcatgtggtcgtaccagtactgggcgcgagccatataggcggcgtgctgagtaccggccagcgatgctgggcattcggtggctgagaagtttttgtgcccgaacacgttcttaccccaggtagggcggccgagcttgtaataccgacagatcgcggccaccaaatgtgcgccgttgtcgaggcaggcgtcagagattttccatgggttagaagaggcgtcggcgtgctcgataccaatgctggtggtattggctgcccagtttccggcgtgccaggcggtgtcgcggtcccacacgagctgcccgatccgcccggaggtttctacctggtagtgggcggaggcgggccgggtctgccacac

SEQ ID NO: 94 - DNA, 6363 bp, Propionibacterium acnes
gtgttgtggactctcggggtcagtctgtccgctcacttgagatggcttaacatttctgaccgacgccgaagtctacgaacgctgcgaaacgccaaccgacgcctttgcaaccaagccttcttcatcaagatctacatcgacgaagacgaccaactccgcgtcgagaacaaccgacctttcgaaatgctcctcgaccctcagatcaacgccaacgccctcacctgggcccagaacggcaacaaggcccgaatcgaaactaaggggttcgagccttgtgcgtggggttacttagacgttcattttgatacaaggatctgggtgggtgcacggaggggctaggtgggtgcattgcatcctgacaggagcgccgggtgagttctggttgactaccagcagcgtgttcggtatgctagaggatagttacgcgacagcgtccgttccaatttctgggagtgtgttaattccgatggtgctgtgatctccgttcggctacgccgagaagcgtccaaatgtttcgacggttttggggatcaatatgtctgctatcgaggtaatcaatctttctttttcattttccgctcagccactcttggataacgtttcattcagcgttggcgatagcgagcgcgcagtacttgtggggcctaatggctctggcaaaaccactctcctgcgcctgatacgaggagagctaaccccggatcgaggacatatcgccatcagtgatgcaggagatgcaggttcttgtcgcttcccttatgttcgtgacgccactggcacagttcaggactatctggacgacgtgttggctggcccatgggagttgctcactcgcttcgaccacgtgacgaagcaactatcggctgcccaaagttcagcgagtctcgctaaagagtacgatcacatactcaccagtcttactctggccgacgtatggtcgctcgaagctcgaatcgatgaagtgttagccggtttaggtctaggccagctgaccggacgcggtcgacagcgcgcactcggctcactctcccctggccaggcagtgcggctcgaactggcaggcatcattatggtcagaccagtaactctggtcttggatgaacccaccaatcatcttgatgacgaagccgtaggctttctgatccagcaaataacagattggccggggccagtgctcatggccagtcataatcgtgcgtttattgaagagacagccacggtcatctatgacctcgatattgccccgtggcaggctttggccacagctgaaggagaggctgtgtctggcgtgtaccggtgcactggcgcctatagtgattatcttggcgccaaacaacacgcccgcatggagcatcaaaagcttcacgccacccagcaatctgaaaaacgcgcgattcgaagtcatcgccgtcgtagcgaagatatcgctcgtggtggagtgaaattagcgaaggcgcagggcatggcacgtaagttcttctctgaccgggcagaaaagaccgcgctgcgacgcacgcgtaacgacgatcaacgcttacacgatcttgctgaacatgaggtgcgaaaaccccgcaactaccaacttaagctcaaccttccaccagtcggctcgcgtggcgggttagccgtcacggcacgaagcgccttcattccaggcaggcttctcccaatcacgttcgaccttgccacgggggaacatttaatactgactggcccgaatggagcggggaaaaccacgctcttgaattggcttgctagtgggaaaacaacaatcgaccctagatccgaagccagcggcactatctctgtcagcgggcggcttgcttacgtcccacagcgcctaccacgcacaggagattcctactttcacccagaacattggaaagacgggatcagagaacttggcacgggaatactccacccatccatgtgggccaccccagtcggccaactttcagatggaaaccagcgtcgagcccagatcgcgttagccgtggcgcagaaacccgagattcttgtcattgacgaaccaaccaactacctcgacctcgccacgcttgaagaactagaggacgcgctacgccaatggaacggcacactcatcatcgccagtcacgaccgctggcttatcaaccactggcagggaacacaaatcgaattatgccccacagatccagcgcccggatcaccgaatcccctcttactcgttaagagccggttcgagccgtggtagtgccgtccttgagtgtgagtttgatagcgccgtcgtggttgacggtggtgtgatcgacgagggtgttccaggcttggtcggagtattcgagtggtggttgggtggcaaggtagtcgcgtacttcgattgcttgtgctcggcggtggcgcagatcgtcgatctggtcgctgatccgttgatgctcggcctcaagttggtggtgccgatcttcaagctcgtggtaacggcgggcgtagtcgtcagggtcgtgggcggtcgtggctgcggggtgatgagttggttcatcagcgtgatggtttcttcgatccgctcccccagcgtggcctgcttggtttcgagctcgcgggtgtcgtagacggtttcgtcgagcaggcgcatggtgtcatcgagcacgtcgttgccggtgacccgcttagccagggctgcgacgaaggcgtctttgatctggtcttcggtgacgtggggtgtcgcgcagtgatgatccttgttgtatttgttgttgcagcgccagatgtagcggcggtatttgctggtggagtgccagactttccgcccaaacctcccgccgcaatcggagcaggtgatcgtgttggcgaaggggtgggtgttggaggtgcctttgcctgcgcggcgggcgagttctgcttggacggtgtcccaggtgacgggatcaatgatgggttcgtggttgctggtgacgtagtactggggtacttcgccttcgttgattttcatggtttggttaggaagtcggtggtgaagctcttttgcagcagcgcgtcgcctttgtatttctcgttggcaaggatcgaccgcacagtggagggcgaccagatttgtttgccacgcggggtggggatgccatcggatgtgaattctttggcgatggtttgtggggttgcgccttcgaggaagcgggcataaatacgacggacggttggtgcttgggtttcgtcgatggcgaggttgccgtcttcgcctttcttgtagccgagcagggacgcgtaggacaccatgattttcccgtcggcgaagcgtttacggtggtcccaggtgacattctcggaaatggagcgggattcttcttgggtgaggctggacatgatggtgatgagtagttcgcctttggaatcgagtgtccagatgttttctttttcgaagtagacctctacgcctttgtctttgagctggcggacgtggatgagggtgtcgacggtgttgcgggcgaaccgggacacgctcttggtgaggatcaaatcgatttttccggcgagggtgtcggcgatcatggttttgaagccttcacggtgtttggtgctggtgccagtgatgccttcgtcggcgtacatgcctgcgaattcccactctgtgcgggattggatgtggctcgtgtagtagtcgatttgtgcctcgtaggaggaggcttgttcttccatctcggtggatacccgcgcgtaggccgctaccctgcgccgacgccgagtaccctgcaccgtggtgtgtccgggtatttttgtggctgggatcgcggtgacacgcttgttccgaatctgcttggtggtcatatcgcactttcctcgtccaggctcaccgccactggcacttcgccgctaatggtgtggatggtgagcgtacgatcgggattgacaacgattttcacgaggcgcgtcagcgcatactcgtcgtcccagtcgtcgaggccaagcacgcgggtgcagatctgggtgagatgggtttctcggatttgtggtgcctggcagggattgcctttacctttggtggcggtttcgcaccaccaaaacttgtaggacgtgtggcggcgtgtcttggtgcggcggtgataaaacctgctacagacagagcattcaatccgagaggtgagcccggtcgttctagctgacggcgtggctccacgtccgagatgtctgcgccgggcgagctcggcctggacggcgccgaacgtggtctggtcgatgatgggcgggtgggattcgtcgacgaggtagcgtggcagctcgccggtgttggtatggcagttcaattctgcaacgtttggccggtaatacttttgcaggattacgcggccggtgtagatttcattttcgagccatttgcggatcgtcttaccgcgaaacttggctccccgcctaggcttgaccccttcagcattcaactgactgatgatcttggcttcagtctcgatgatagccaagtcactacccacgtattggtagccgtagggttggcgcgaatgcatgagcccgtcggcgtatttcttccttatcccccatttaacattcttcgacatggatcgagattcctcctgcgcaaacgatgccagcagggtcagcaggagttcaccgtcagcggtcgcggtatcgatctgttcacgctcgaaacgcactgagacgccgaggattttgagttcgcggacggcatcgagcaggtcgacggtgttgcgagtcagcctggatatcgacttcgtcaaaatcatgtcgatgtcgccggagcgggcggcggccatcatggtctggaacccctctcgacggacggtactggtgccggtgatgccttcgtcgatgaacacgcctgcatagtcccaaccaggggtggattgaatcagatgagagtagtacgacacctgggcggcaatcgaagatagctggcgttcgtgctcggtcgatacccgcgcataccctgctactcgtagccgacgtggcgtggcgggtctaggtgggataactcgaaaactacgcgaggtcactccctgcttctctttcttctatggcgacaggtgttttggttgtatccatctacgctctaaacctgagtcttatccagtcgaacctgcagcaacaatgcccccactggcgcggttgcttcatgcccgatccgcgtaaggatcacgtggctttcgtttggggtgagtgcgccggtttcggtgagccgatcaataaaggcgacctggcgggcaagatcgacttcggcattgaacatggcacccgtcacggtctgccacctcgggtgctgaagcggtgcctgatatagcaggcatgcgagcaatacttacggtgcttgtttccgtaggcctcgaagctctcaccgcaagcaacgcaggtgaaggtgtatattgcccgccggttgagccgttcggggtgggcgtgctaccacgacaaacgacacacatccgaacagaacctttgccccgccaccgcagcttcaaaatgcccattacagtgttcgcatgccttagcaggctcaacatcaaccgccggatcgatgttgatgtcagctctgcgacagatcgacttcaccgtattgcgcgacatgcccaatctggtggcgatctgcccatacgatgcgcctcggcatcgcagctccacaactcgctcacgggtaatctcacgtgccatgacgcgctcctgctcaatagaaataaggtctctactgacagggcttcgacccaccccgatttataaccaccactgtcctggtgcgatgggaacaaaaatggccccgccaccacctcatgtagtgaggcagcgacggggcgaaacaggacagttttcatgagtcttggtttagtggcggagtttttcgttgacccggcgctggacggcgtcgtagttggatccgagtctgcgtcggcgttcgttgccgttgccgtattcgccgcggatgaccgcgtcagcgagcgcgtcaatgttcggtgccggcttcggtgtgggtgcgggtttcggtgccggcgcgggtgcgggcgtgttgccggtcatgtggtcgtaccagtactgggcgcgagccatataggcggcgtgctgagtaccggccagcgatgctgggcattcggtggctgagaagtttttgtgcccgaacacgttcttaccccaggtagggcggccgagcttgtaataccgacagatcgcggccaccaaatgtgcgccgttgtcgaggcaggcgtcagagattttccatgggttagaagaggcgtcggcgtgctcgataccaatgctggtggtattggctgcccagtttccggcgtgccaggcggtgtcgcggtcccacacgagctgcccgatccgcccggaggtttctacctggtagtgggcggaggcgggccgggtctgccacac

SEQ ID NO: 95 - DNA, 6363 bp, Propionibacterium acnes
gtgttgtggactctcggggtcagtctgtccgctcacttgagatggcttaacatttctgaccgacgccgaagtctacgaacgctgcgaaacgccaaccgacgcctttgcaaccaagccttcttcatcaagatctacatcgacgaagacgaccaactccgcgtcgagaacaaccgacctttcgaaatgctcctcgaccctcagatcaacgccaacgccctcacctgggcccagaacggcaacaaggcccgaatcgaaactaaggggttcgagccttgtgcgtggggttacttagacgttcattttgatacaaggatctgggtgggtgcacggaggggctaggtgggtgcattgcatcctgacaggagcgccgggtgagttctggttgactaccagcagcgtgttcggtatgctagaggatagttacgcgacagcgtccgttccaatttctgggagtgtgttaattccgatggtgctgtgatctccgttcggctacgccgagaagcgtccaaatgtttcgacggttttggggatcaatatgtctgctatcgaggtaatcaatctttctttttcattttccgctcagccactcttggataacgtttcattcagcgttggcgatagcgagcgcgcagtacttgtggggcctaatggctctggcaaaaccactctcctgcgcctgatacgaggagagctaaccccggatcgaggacatatcgccatcagtgatgcaggagatgcaggttcttgtcgcttcccttatgttcgtgacgccactggcacagttcaggactatctggacgacgtgttggctggcccatgggagttgctcactcgcttcgaccacgtgacgaagcaactatcggctgcccaaagttcagcgagtctcgctaaagagtacgatcacatactcaccagtcttactctggccgacgtatggtcgctcgaagctcgaatcgatgaagtgttagccggtttaggtctaggccagctgaccggacgcggtcgacagcgcgcactcggctcactctcccctggccaggcagtgcggctcgaactggcaggcatcattatggtcagaccagtaactctggtcttggatgaacccaccaatcatcttgatgacgaagccgtaggctttctgatccagcaaataacagattggccggggccagtgctcatggccagtcataatcgtgcgtttattgaagagacagccacggtcatctatgacctcgatattgccccgtggcaggctttggccacagctgaaggagaggctgtgtctggcgtgtaccggtgcactggcgcctatagtgattatcttggcgccaaacaacacgcccgcatggagcatcaaaagcttcacgccacccagcaatctgaaaaacgcgcgattcgaagtcatcgccgtcgtagcgaagatatcgctcgtggtggagtgaaattagcgaaggcgcagggcatggcacgtaagttcttctctgaccgggcagaaaagaccgcgctgcgacgcacgcgtaacgacgatcaacgcttacacgatcttgctgaacatgaggtgcgaaaaccccgcaactaccaacttaagctcaaccttccaccagtcggctcgcgtggcgggttagccgtcacggcacgaagcgccttcattccaggcaggcttctcccaatcacgttcgaccttgccacgggggaacatttaatactgactggcccgaatggagcggggaaaaccacgctcttgaattggcttgctagtgggaaaacaacaatcgaccctagatccgaagccagcggcactatctctgtcagcgggcggcttgcttacgtcccacagcgcctaccacgcacaggagattcctactttcacccagaacattggaaagacgggatcagagaacttggcacgggaatactccacccatccatgtgggccaccccagtcggccaactttcagatggaaaccagcgtcgagcccagatcgcgttagccgtggcgcagaaacccgagattcttgtcattgacgaaccaaccaactacctcgacctcgccacgcttgaagaactagaggacgcgctacgccaatggaacggcacactcatcatcgccagtcacgaccgctggcttatcaaccactggcagggaacacaaatcgaattatgccccacagatccagcgcccggatcaccgaatcccctcttactcgttaagagccggttcgagccgtggtagtgccgtccttgagtgtgagtttgatagcgccgtcgtggttgacggtggtgtgatcgacgagggtgttccaggcttggtcggagtattcgagtggtggttgggtggcaaggtagtcgcgtacttcgattgcttgtgctcggcggtggcgcagatcgtcgatctggtcgctgatccgttgatgctcggcctcaagttggtggtgccgatcttcaagctcgtggtaacggcggtcgtagtcgtcagggtcgtgggcggtcgtggctgcggggtgatgagttggttcatcagcgtgatggtttcttcgatccgctcccccagcgtggcctgcttggtttcgagctcgcgggtgtcgtagacggtttcgtcgagcaggcgcatggtgtcatcgagcacgtcgttgccggtgacccgcttagccagggctgcgacgaaggcgtctttgatctggtcttcggtgacgtggggtgtcgcgcagtgatgatccttgttgtatttgttgttgcagcgccagatgtagcggcggtatttgctggtggagtgccagactttccgcccaaacctcccgccgcaatcggagcaggtgatcgtgttggcgaaggggtgggtgttggaggtgcctttgcctgcgcggcgggcgagttctgcttggacggtgtcccaggtgacgggatcaatgatgggttcgtggttgctggtgacgtagtactggggtacttcgccttcgttgattttcatggtttggttaggaagtcggtggtgaagctcttttgcagcagcgcgtcgcctttgtatttctcgttggcaaggatcgaccgcacagtggagggcgaccagatttgtttgccacgcggggtggggatgccatcggatgtgaattctttggcgatggtttgtggggttgcgccttcgaggaagcgggcataaatacgacggacggttggtgcttgggtttcgtcgatggcgaggttgccgtcttcgcctttcttgtagccgagcagggacgcgtaggacaccatgattttcccgtcggcgaagcgtttacggtggtcccaggtgacattctcggaaatggagcgggattcttcttgggtgaggctggacatgatggtgatgagtagttcgcctttggaatcgagtgtccagatgttttctttttcgaagtagacctctacgcctttgtctttgagctggcggacgtggatgagggtgtcgacggtgttgcgggcgaaccgggacacgctcttggtgaggatcaaatcgatttttccggcgagggtgtcggcgatcatggttttgaagccttcacggtgtttggtgctggtgccagtgatgccttcgtcggcgtacatgcctgcgaattcccactctgtgcgggattggatgtggctcgtgtagtagtcgatttgtgcctcgtaggaggaggcttgttcttccatctcggtggatacccgcgcgtaggccgctaccctgcgccgacgccgagtaccctgcaccgtggtgtgtccgggtatttttgtggctgggatcgcggtgacacgcttgttccgaatctgcttggtggtcatatcgcactttcctcgtccaggctcaccgccactggcacttcgccgctaatggtgtggatggtgagcgtacgatcgggattgacaacgattttcacgaggcgcgtcagcgcatactcgtcgtcccagtcgtcgaggccaagcacgcgggtgcagatctgggtgagatgggtttctcggatttgtggtgcctggcagggattgcctttacctttggtggcggtttcgcaccaccaaaacttgtaggacgtgtggcggcgtgtcttggtgcggcggtgataaaacctgctacagacagagcattcaatccgagaggtgagcccggtcgttctagctgacggcgtggctccacgtccgagatgtctgcgccgggcgagctcggcctggacggcgccgaacgtggtctggtcgatgatgggcgggtgggattcgtcgacgaggtagcgtggcagctcgccggtgttggtatggcagttcaattctgcaacgtttggccggtaatacttttgcaggattacgcggccggtgtagatttcattttcgagccatttgcggatcgtcttaccgcgaaacttggctccccgcctaggcttgaccccttcagcattcaactgactgatgatcttggcttcagtctcgatgatagccaagtcactacccacgtattggtagccgtagggttggcgcgaatgcatgagcccgtcggcgtatttcttccttatcccccatttaacattcttcgacatggatcgagattcctcctgcgcaaacgatgccagcagggtcagcaggagttcaccgtcagcggtcgcggtatcgatctgttcacgctcgaaacgcactgagacgccgaggattttgagttcgcggacggcatcgagcaggtcgacggtgttgcgagtcagcctggatatcgacttcgtcaaaatcatgtcgatgtcgccggagcgggcggcggccatcatggtctggaacccctctcgacggacggtactggtgccggtgatgccttcgtcgatgaacacgcctgcatagtcccaaccaggggtggattgaatcagatgagagtagtacgacacctgggcggcaatcgaagatagctggcgttcgtgctcggtcgatacccgcgcataccctgctactcgtagccgacgtggcgtggcggggctaggggggataactcgaaaactacgcgaggtcactccctgcttctctttcttctatggcgacaggtgttttggttgtatccatctacgctctaaacctgagtcttatccagtcgaacctgcagcaacaatgcccccactggcgcggttgcttcatgcccgatccgcgtaaggatcacgtggctttcgtttggggtgagtgcgccggtttcggtgagccgatcaataaaggcgacctggcgggcaagatcgacttcggcattgaacatggcacccgtcacggtctgccacctcgggtgctgaagcggtgcctgatatagcaggcatgcgagcaatacttacggtgcttgtttccgtaggcctcgaagctctcaccgcaagcaacgcaggtgaaggtgtatattgcccgccggttgagccgttcggggtgggcgtgctaccacgacaaacgacacacatccgaacagaacctttgccccgccaccgcagcttcaaaatgcccattacagtgttcgcatgccttagcaggctcaacatcaaccgccggatcgatgttgatgtcagctctgcgacagatcgacttcaccgtattgcgcgacatgcccaatctggtggcgatctgcccatacgatgcgcctcggcatcgcagctccacaactcgctcacgggtaatctcacgtgccatgacgcgctcctgctcaatagaaataaggtctctactgacagggcttcgacccaccccgatttataaccaccactgtcctggtgcgatgggaacaaaaatggccccgccaccacctcatgtagtgaggcagcgacggggcgaaacaggacagttttcatgagtcttggtttagtggcggagtttttcgttgacccggcgctggacggcgtcgtagttggatccgagtctgcgtcggcgttcgttgccgttgccgtattcgccgcggatgaccgcgtcagcgagcgcgtcaatgttcggtgccggcttcggtgtgggtgcgggtttcggtgccggcgcgggtgcgggcgtgttgccggtcatgtggtcgtaccagtactgggcgcgagccatataggcggcgtgctgagtaccggccagcgatgctgggcattcggtggctgagaagtttttgtgcccgaacacgttcttaccccaggtagggcggccgagcttgtaataccgacagatcgcggccaccaaatgtgcgccgttgtcgaggcaggcgtcagagattttccatgggttagaagaggcgtcggcgtgctcgataccaatgctggtggtattggctgcccagtttccggcgtgccaggcggtgtcgcggtcccacacgagctgcccgatccgcccggaggtttctacctggtagtgggcggaggcgggccgggtctgccacac

SEQ ID NO: 96 - DNA, 6363 bp, Propionibacterium acnes; identical to SEQ ID NO: 95

SEQ ID NO: 97 - DNA, 6363 bp, Propionibacterium acnes
gtgttgtggactctcggggtcagtctgtccgctcacttgagatggcttaacatttctgaccgacgccgaagtctacgaacgctgcgaaacgccaaccgacgcctttgcaaccaagccttcttcatcaagatctacatcgacgaagacgaccaactccgcgtcgagaacaaccgacctttcgaaatgctcctcgaccctcagatcaacgccaacgccctcacctgtgcccagaacggcaacaaggcccgaatcgaaactaaggggttcgagccttgtgcgtggggttacttagacgttcattttgatacaaggatctgggtgggtgcacggaggggctaggtgggtgcattgcatcctgacaggagcgccgggtgagttctggttgactaccggcagcgtgttcggtatgctagaggatagttacgcgacagcgtccgttccaatttctgggagtgtgttaattccgatggtgctgtgatctccgttcggctacgccgagaagcgtccaaatgtttcgacggttttggggatcaatatgtctgctatcgaggtaatcaatctttctttttcattttccgctcagccactcttggataacgtttcattcagcgttggcgatagcgagcgcgcagtacttgtggggcctaatggctctggcaaaaccactctcctgcgcctgatacgaggagagctaaccccggatcgaggacatatcgccatcagtgatgcaggagatgcaggttcttgtcgcttcccttatgttcgtgacgccactggcacagttcaggactatctggacgacgtgttggctggcccatgggagttgctcactcgcttcgaccacgtgacgaagcaactatcggctgcccaaagttcagcgagtctcgctaaagagtacgatcacatactcaccagtcttactctggccgacgtatggtcgctcgaagctcgaatcgatgaagtgttagccggtttaggtctaggccagctgaccggacgcggtcgacagcgcgcactcggctcactctcccctggccaggcagtgcggctcgaactggcaggcatcattatggtcagaccagtaactctggtcttggatgaacccaccaatcatcttgatgacgaagccgtaggctttctgatccagcaaataacagattggccggggccagtgctcatggccagtcataatcgtgcgtttattgaagagacagccacggtcatctatgacctcgatattgccccgtggcaggctttggccacagctgaaggagaggctgtgtctggcgtgtaccggtgcactggcgcctatagtgattatcttggcgccaaacaacacgcccgcatggagcatcaaaagcttcacgccacccagcaatctgaaaaacgcgcgattcgaagtcatcgccgtcgtagcgaagatatcgctcgtggtggagtgaaattagcgaaggcgcagggcatggcacgtaagttcttctctgaccgggcagaaaagaccgcgctgcgacgcacgcgtaacgacgatcaacgcttacacgatcttgctgaacatgaggtgcgaaaaccccgcaactaccaacttaagctcaaccttccaccagtcggctcgcgtggcgggttagccgtcacggcacgaagcgccttcattccaggcaggcttctcccaatcacgttcgaccttgccacgggggaacatttaatactgactggcccgaatggagcggggaaaaccacgctcttgaattggcttgctagtgggaaaacaacaatcgaccctagatccgaagccagcggcactatctctgtcagcgggcggcttgcttacgtcccacagcgcctaccacgcacaggagattcctactttcacccagaacattggaaagacgggatcagagaacttggcacgggaatactccacccatccatgtgggccaccccagtcggccaactttcagatggaaaccagcgtcgagcccagatcgcgttagccgtggcgcagaaacccgagattcttgtcattgacgaaccaaccaactacctcgacctcgccacgcttgaagaactagaggacgcgctacgccaatggaacggcacactcatcatcgccagtcacgaccgctggcttatcaaccactggcagggaacacaaatcgaattatgccccacagatccagcgcccggatcaccgaatcccctcttactcgttaagagccggttcgagccgtggtagtgccgtccttgagtgtgagtttgatagcgccgtcgtggttgacggtggtgtgatcgacgagggtgttccaggcttggtcggagtattcgagtggtggttgggtggcaaggtagtcgcgtacttcgattgcttgtgctcggcggtggcgcagatcgtcgatctggtcgctgatccgttgatgctcggcctcaagttggtggtgccgatcttcaagctcgtggtaacggcggtcgtagtcgtcagggtcgtgggcggtcgtggctgcggggtgatgagttggttcatcagcgtgatggtttcttcgatccgctcccccagcgtggcctgcttggtttcgagctcgcgggtgtcgtagacggtttcgtcgagcaggcgcatggtgtcatcgagcacgtcgttgccggtgacccgcttagccagggctgcgacgaaggcgtctttgatctggtcttcggtgacgtggggtgtcgcgcagtgatgatccttgttgtatttgttgttgcagcgccagatgtagcggcggtatttgctggtggagtgccagactttccgcccaaacctcccgccgcaatcggagcaggtgatcgtgttggcgaaggggtgggtgttggaggtgcctttgcctgcgcggcgggcgagttctgcttggacggtgtcccaggtgacgggatcaatgatgggttcgtggttgctggtgacgtagtactggggtacttcgccttcgttgattttcatggtttggttaggaagtcggtggtgaagctcttttgcagcagcgcgtcgcctttgtatttctcgttggcaaggatcgaccgcacagtggagggcgaccagatttgtttgccacgcggggtggggatgccatcggatgtgaattctttggcgatggtttgtggggttgcgccttcgaggaagcgggcataaatacgacggacggttggtgcttgggtttcgtcgatggcgaggttgccgtcttcgcctttcttgtagccgagcagggacgcgtaggacaccatgattttcccgtcggcgaagcgtttacggtggtcccaggtgacattctcggaaatggagcgggattcttcttgggtgaggctggacatgatggtgatgagtagttcgcctttggaatcgagtgtccagatgttttctttttcgaagtagacctctacgcctttgtctttgagctggcggacgtggatgagggtgtcgacggtgttgcgggcgaaccgggacacgctcttggtgaggatcaaatcgatttttccggcgagggtgtcggcgatcatggttttgaagccttcacggtgtttggtgctggtgccagtgatgccttcgtcggcgtacatgcctgcgaattcccactctgtgcgggattggatgtggctcgtgtagtagtcgatttgtgcctcgtaggaggaggcttgttcttccatctcggtggatacccgcgcgtaggccgctaccctgcgccgacgccgagtaccctgcaccgtggtgtgtccgggtatttttgtggctgggatcgcggtgacacgcttgttccgaatctgcttggtggtcatatcgcactttcctcgtccaggctcaccgccactggcacttcgccgctaatggtgtggatggtgagcgtacgatcgggattgacaacgattttcacgaggcgcgtcagcgcatactcgtcgtcccagtcgtcgaggccaagcacgcgggtgcagatctgggtgagatgggtttctcggatttgtggtgcctggcagggattgcctttacctttggtggcggtttcgcaccaccaaaacttgtaggacgtgtggcggcgtgtcttggtgcggcggtgataaaacctgctacagacagagcattcaatccgagaggtgagcccggtcgttctagctgacggcgtggctccacgtccgagatgtctgcgccgggcgagctcggcctggacggcgccgaacgtggtctggtcgatgatgggcgggtgggattcgtcgacgaggtagcgtggcagctcgccggtgttggtatggcagttcaattctgcaacgtttggccggtaatacttttgcaggattacgcggccggtgtagatttcattttcgagccatttgcggatcgtcttaccgcgaaacttggctccccgcctaggcttgaccccttcagcattcaactgactgatgatcttggcttcagtctcgatgatagccaagtcactacccacgtattggtagccgtagggttggcgcgaatgcatgagcccgtcggcgtatttcttccttatcccccatttaacattcttcgacatggatcgagattcctcctgcgcaaacgatgccagcagggtcagcaggagttcaccgtcagcggtcgcggtatcgatctgttcacgctcgaaacgcactgagacgccgaggattttgagttcgcggacggcatcgagcaggtcgacggtgttgcgagtcagcctggatatcgacatcgtcaaaatcatgtcgatgtcgccggagcgggcggcggccatcatggtctggaacccctctcgacggacggtactggtgccggtgatgccttcgtcgatgaacacgcctgcatagtcccaaccaggggtggattgaatcagatgagagtagtacgacacctgggcggcaatcgaagatagctggcgttcgtgctcggtcgatacccgcgcataccctgctactcgtagccgacgtggcgtggcgggtctaggtgggataactcgaaaactacgcgaggtcactccctgcttctctttcttctatggcgacaggtgttttggttgtatccatctacgctctaaacctgagtcttatccagtcgaacctgcagcaacaatgcccccactggcgcggttgcttcatgcccgatccgcgtaaggatcacgtggctttcgtttggggtgagtgcgccggtttcggtgagccgatcaataaaggcgacctggcgggcaagatcgacttcggcattgaacatggcacccgtcacggtctgccacctcgggtgctgaagcggtgcctgatatagcaggcatgcgagcaatacttacggtgcttgtttccgtaggcctcgaagctctcaccgcaagcaacgcaggtgaaggtgtatattgcccgccggttgagccgttcggggtgggcgtgctaccacgacaaacgacacacatccgaacagaacctttgccccgccaccgcagcttcaaaatgcccattacagtgttcgcatgccttagcaggctcaacatcaaccgccggatcgatgttgatgtcagctctgcgacagatcgacttcaccgtattgcgcgacatgcccaatctggtggcgatctgcccatacgatgcgcctcggcatcgcagctccacaactcgctcacgggtaatctcacgtgccatgacgcgctcctgctcaatagaaataaggtctctactgacagggcttcgacccaccccgatttataaccaccactgtcctggtgcgatgggaacaaaaatggccccgccaccacctcatgtagtgaggcagcgacggggcgaaacaggacagttttcatgagtcttggtttagtggcggagtttttcgttgacccggcgctggacggcgtcgtagttggatccgagtctgcgtcggcgttcgttgccgttgccgtattcgccgcggatgaccgcgtcagcgagcgcgtcaatgttcggtgccggcttcggtgtgggtgcgggtttcggtgccggcgcgggtgcgggcgtgttgccggtcatgtggtcgtaccagtactgggcgcgagccatataggcggcgtgctgagtaccggccagcgatgctgggcattcggtggctgagaagtttttgtgcccgaacacgttcttaccccaggtagggcggccgagcttgtaataccgacagatcgcggccaccaaatgtgcgccgttgtcgaggcaggcgtcagagattttccatgggttagaagaggcgtcggcgtgctcgataccaatgctggtggtattggctgcccagtttccggcgtgccaggcggtgtcgcggtcccacacgagctgcccgatccgcccggaggtttctacctggtagtgggcggaggcgggccgggtctgccacac

SEQ ID NO: 98 - DNA, 20723 bp, Propionibacterium acnes
gtgttccagtgcctcgcgggcgtgatgttcttcttcggcaccttcttgccacatgcttcgcgcttcagcctcgccatccaagcgaacctggactgtgaacgagtcctcatcgggtccgtcctcattccacgcggcaatgatcccacgggcctcgtctgcgacctgactcaacttcatcgcctgcccgacagccccgagagccggaatctcgaacacccagatattcgcctcagccgagacctcacgatgggcgatcacttcgtaggtcgtctcaccttctactgtcgtgtccattacttccactccttcggaattttcacgcctgctcgctccagctgtgccaggacaccaactgacgtcagctggtgtcctgctggtatcgatacgcgcccggctccgccggggcgtccccagatttcatggcttcccttggcgttccgcagacgggcccatccttgagaacggagcagcttgaggacgtccttagttttctgcggtttcacacatcatagtatagccccacttaacttgtaaactaagcccctgtttacattttagttggtgcatgtgatccctgctcttatgacgtcgcccgacctggcgccttagacatgcactgttcatcctcaaccacactcaccgtcacgggtccgaaggcgaggtctatcaccattcgcatcgatgaagttgaagcaggatcgtccgcatcacgcactgccgatccggacagacgccaccggccgtaccgactgtttacgatctgccaccgcagactgctgccataaccgctatcacctctgatagtacttttagtactatcagaggtgattcaagattctcctgtcgagcagccctacagtcacgaagtcctgcgatcgtcatcgcttaaggcagacggatggccatcggggaccactcgcaaagcaggggcgatcagcaacagtgatgtgccatgagcaagtactggtgcaccggctgtttactccgcccctagataaaccacgggtgcaggggtggacaccacaccatgaccgatgtggtgcccaccccatggctcacaggcaggccctatcgccgggagcactgctgcagatgaggctcagtaacctgccatgtctcacctggggccaaggtgccaagctccccacggaatctcaggcatcggaaaccagcagccgaacttccacagcatgagcgccctacgaaaaagcaggccgccgacggttctcaagaactcgccggcggcctgcatcgccactcgaactgtaaccgtggtccgaccccgtgcacaggtaagctccacactcccaccaggcatggccgaggcagtaccaagttgccgtggcccatcggcagatttggttaaattttgaaaagtcatatagactccttctgtaaatttttaaatctcataggactctcgccatcgccagccagcttcgacaggagtcccgatgtttcaccgagtgaaatatcggcaccgtttgagttgacctaaagctcaaaagatgctagaatccatcttacctcgttaggggcgttttgtcaaacgcccctatattgcgtgtcttcgcgcgtcgtagcgctgatgctgcgcctgtgtcgactatccgtttgtaagtactttcgatgacaccagcagtggctactcatgactggtgcgtgcgggtctaaagcagcagggaaaggaatcgcagtagaagccgcttgattcctatcacccctgatggtactatcagtactaacagagcagggcttactcgatgcgtgagaatcggggacatgctgagcctctcgtaggtcattggcctgctgggcgtcagtgtggcgcggttcgatccagtgaactctatcagctctgttagtactgtcagagttgatatattcgaccccaggaggagcccatgagttacatcgttcgcaccggaaatttggtcgacacccccgagctgcgtgagggagagcatggccgtacacctacgctcgcgtcatcgtgtccgatcgcattcgccaggaggacggcagctacgtcaacgggccagcgatcgcctacgacgtcttggcgggtggcagccaagccgtgaatctggttgaagccgccaaggcgagcggcaacatccgcatcatgttcgcgggccgttaccgcgtcaccgagtggcggggtgagcagggcactcgtatccagcatgaggtccgagccgacgaggtgagcgtgagcctgctcggtcagagggtgaccgtggagcggcctcgaggtgacgtggcatccaaggagagcacgtcgttctgattgagtccgggggcacggtggtcgccgtggtaaaccgtgcccctgacagtactattgacactattggaggtatcagtgtgactgctcaaattttcgccttgtgcaaccagaagggtggcgtcggaaagtcgacatcgacgtttcatctggcccgtgccgcggtgttgcgtggccagcgtgtgcttgtcgtcgacaacgacccccagggcaacctgacgtctgtcgcggccgccgagcccgtgggggaggatcaggcggggctggccgatgtgctcagcgcgcgtgctccagagaccctccgcgatgtgatcgtgccgggaatctggtctggcctcgatgtcgtgccgacgtctggcatcacgctcggctgggtgcgtgacgaactcgtgatcgccggtgccggccgagaaggccggctgcgggaggccctggccggcgtcgaggacgactacgacgtgatcctgatcgactgtgctccatcgctcgatcagctcacgatcaacggcctggtggccgcccagggtgtcatcgtcgtgacgcactcgaagttgtggagcgccaacggcctcgcccagctgctcgacaccatcgacagcgtgcgcagctactacaacggcgcgctgcgcgtggcgggcatcatcgtcaaccagcacgaggagaacaccatcagcgggaaaacctggctcgacgagctgcatcaggctgccgagtcccggaagctgaccgtgcttgacccgccgatccccaagcgtgtcgtcatcgccgataccgtcgaggccgcgcgcggtctcgacgagtggggaagtgccgaggcggccgcgctcggccagttgtacgcccaccacctgacctgcatcgaaggagccctgtgatgacccgtccagccccccgaaagtcctcattgagcggatcaactccggtcgccccgccggctcagacggcgccggcaccgtctgccgcacctaccccccacaaggccgatgagtcacagacgagcagcaccacgaggaagtggcggcacaaggtgtcgttctaccaggacccggccgacaccgaccgggtgcgcggggcgatcctttacacgatgacgaccgagggcaaccggaacctgagccagttcgtcaacgatgccgtcatggccaaggtggtcgagctggaagtcaagtacaacgatggccagccattccccgctgtgggagcccgaggactaccccagggcggtgcagccgccgccggtgagtagaggaccatcgaccgtcgggggcttcaccatgcccccgaccctcggtcatcctgatcctcttgtcgatggtggtgacagtgggggattcacgcctcgttcagatcagaggaagtctcaccgcgtgattagtactatcaaatctgacagtactaacagagcagatagggttccctaggtcgagctgtatcacgccgacaaccagtgagccagtgatctacggggggcgcaatatgcacccgatcggtagccgcgaaggcctcgccctgccccgatagtactatcaccactatcaatggtgctagtggtgagtttcttccattgatgacaacagcacagtgctgccgtctgtgtgcgggccaccagcccgcacacagttgccgtcgaggacgttgttcatgctctgtggtggccggtcctgagggcggctcgcaggatctcccggcgctcacggcgacgagcctggtagccaaggtctgcatgttcggcggcgagacgggctttgagggttgcggcttctgcacggcggtggagttggtcgtcgatgagttgggcgcgggccagacgccgcttatgggggttgtcgtgggtgaggggggcgtcgaggctgccgtcgtgggttagggccagggctgctcgttcggcgtcgtcgaggccgatgtggtggacggtcacgggtgcggtggtgacgtcgaggatgtccaggtggatgttgtggccgccgccgggggcttcggggaagtctggtgggctggcctggccggtgtcggggtcataccaggacaggccgatgatctcggcccagggtgggggcgggcagacggctcgcagaagggtgtgggccaggaacgtgttgcgggccatgatgcctccaagggtgaaaagcagtcgagtagcgatgacggcggggtagccgtctgctgggctgaggccgaccgggcccatgtcctcgatgctcttgtgctgcggccataccccaaagctaccaaacagtctttttaatctcaaagatacaaacagtgcttgacatattatctgcagcgaaagatactttcatcatggtggctgatcatgattacgcgactcctgacgatgagtggatgacacctcctcaggtggcccgtgtgattccgaacaccactgctcaggctgtccggcgctgggctgaggagggtcagcttcctggggcgtttcgtactccttctgggcgttggcatattccgtggtcggctgtggtgggcatcatggggtttgatccgcgtgagtccgcatcaccgagtgatcgtcaccagagctgacagagtcgtcgatgagctttcgagtgcagagctgatggcacgacggtctggatacttgtggagatgagagacgactacatccagtcatggtcggggtacaccgaggggcagattcagcagtgctggcacgatgaggttgcccctgccattgactcgctcatggagcaggtaaggtctgttgccgagactcctgtgccgccgggttcgagattttacggcgatgagcagtgggccaagccttttcatccgtctactgcgatctgcggttcaatgggtccgccagcgatcacttgcacgcgctgaagctcctcgtctgggaagcgaacgtccaccatgtctatgcgccgtacacccttgctcgtgcatctattgaggcatcgtctactgctgtgtggctgttgagcacgaagacgcgcggagaacgtgtgctgcgagccttgcgatggtacgcgcaggattgtcacgactcgtgcaggttcatggatgatgagcagtatcgtgaccacctattgcggcgcattgaggggactgtcgctgcgggaaatctcgactcgcgcgctgctaggaaacggtaccgtgcaaccgatgttgtcgatgaggctgatcagctggttcccggaactctgagggcgtggcgagctttttctggtatggcccattcccgtatgtgggcatccagggggctgctcgacatggaagtgctgtccagtggccaaggaatggttacggcgaaggtgacgagcggatcggcccaaatcctttgggccgtcgtggcagctctgaatgttgctctcagtgccgctcgcttgtggcgtgattcgatgtgctcaccgtttgctgttgcccagtcggtagacgcgatgccagaggcgtttcgccgccctgtttagggtctgatcggggtagtgggtgttcacggggtcccaggttggccatggggcggcttggtgatgtgagttgggttgtgtggcagcctgggtgttgggtgtggcttcgttggccacgaaggcatgctcttccttgtgctgggacttgagtccccagtgctctcccctttgctagtggggggtggggtccccggaggtaggtcctccggggactttttctatgtctgtccgtgccccaggatttcgtatctaggcagtaccaattttgggttagttggaggtttctttggtaatggacagggtgagggtgatgaagaggtggccgtccttggtggcagaaattttctcgaacttcagctgaatgttgttatcagccactatctgttgggcggtgaggtgctcggagagcttctggaatccttcgcggatccacaggttgtaggggttggtgaccgagaccgaagggtatgggtcgaccttcagcgtcaggactggctggtctgggttgagggagttgatcttcaccagtttggggtaccggtcgcactcatgtgtctcttgtgttgggggccagcagtcgggggcccattcctcccagtggtcacgcatctcacgaagtactttcctgcatctcagcctctgcaggagctcgcgcgccaccgatgggagggctgccatgatgagggcaaggactgcgaacccgatgatgtaattgaccgtgtccctcgtcacgccgttcttgccgaggattccgatggcgaacgcgatgacgacaccgcccaggcacaggtgcatggggtcatgctgtgatggtttttcttcttcagcgactggtggggctatagtcatgtgtgccccttagtactaagtgatactggtgggttgcttttccccggtggccgtgtgcaagacggccaccggggttttccttcatgttcctgattttatctgcccggtgtggcgttttcatctttgtgtgggtggttcgcctggggtcttggagtgtggtgacgcggtgatggtcacggtgacggtgactgtggcgcgtggcgggtgaggtggttctttcctggtctggtgtgtggcccaggtgagtgtggtgatgagggccagggtgaggatgatgaccagggtggggagtagtttgtctggccggtgtcgccgggcttggtggcgcggcatgtttttccagggtgtgtctccgaacaggtcgtcgtcggaggggtcgtcgtggttcatagggtggccttggcgatggtggtgggcgagtttggtccaggtgatggtgccgtcggaggcgatgtggcggtcggcgggcagggtgtggacggtccatccggcgtcggtgagggcggtggtgaaggatttcttgatggatcgtttgggtaggtcgatgggggcgtgggtgccgacccagatgcaccggtttttgaggtgggtggcgccgaggtggttcatgtcgcggaccatgttttgggtgagtgtgagggtgtcggggtcccattggacggggatgatgatgtggtctgcgatggtgatggcgtgttgccaggcggcgtcgaggtcgttgtttccggtgtcgaggatgatgacgtggaagcggcttcttagggcggtgatgatgcggtcgaggtcgtcggcggtggggggtgtgatgaggctgttgtggttgtcggtgatggtgggtaggcatgtgatggtggcccagccttctggttgccaggagatgtaggggtcgaggtcgcggggttgggaggcgaatcctgggtgacgggctgcgcgggcgaggtcgatgacggtgttgtcggtgtggcggggtgcgcgggtggagagggtgccgcgtgggttgatttccacgacgacgatgtcgtcgtgtcctgctgtggtggcgagggcttgggcaaggatgacggccagcggggttttgccggtgccgcctttgaggttggcgagggtgatgatgtggtcggtgagttgggcgggtgcggcggtgtggtgagggttggcggtgaggttggcgatggtgaacagggcatcgagatcgtcggtggtgttctgctcggtgggttgggggtcgccggagatgatcgggtcggcgcggcgcggctgccatgccggcctcaccactgtcacgaccaccacgggtctgctggcgctgtgtgggtgtcgtcggcgatgactcacgatcggcagtctcaccatcgtctcggtgatgctcggctagcgctggacccggtcaagttcgggccggctcacccagtggtgatgactcggtcacagaaccgctgccggtcgttatctcggacgtctcgactcctccagtcctgatgggcgttggagccacctacacctactctcagaacgaccccgacctcgtgtggggcgggggcagatgtcacttgggccaatcgagagcccaggtgatggggaaagcaggggtgtgatatctgtcctggaaaactgggcagctgctaccgtggattgacggatctccacgaaagaagggaatgcgaccatgcagatcaccgtcaagaccatcaaagatcatcgggttcgcactgtccagaccgccatgagcagcgccttggggattggttcccaggtagacatgctcgcccccggcggttccaccagctcgagttccggttcatgctgctcgtgctcgacctgcgcggtagtggcgcagcctcaagactgaacggctggtcagccccaggggcgtggcgctcatcgcgtcacgccccttctattcgctggacagggtgcgcgagctgaggaacatcgcggtgtgtgcgatgacgaggggcaggagcaagtctgtgcgggttgccaagtagccctgcgcgatggccatcacgctggccccgacggcggcgaagacacctccgatacgtcgcttcatgccgccgaattgcatcaggacgaataggactcccgcggtccacatccctccgggcatgcatctgggaaagatgaaccggaagatgatctcttcacaggagagctggagtactagcagcgtagcccccacggggagactcacctctactgacagacggatcgtcttcatccacccacccgagctggcatcgaccatttcggtggccatgcgcgaccggtggcctcgtgcctctcgctgcgtgtcgatccagccgagcagtccgtggacgctctccgctaggactcctgacgcgacagtctcaccaattcctaagcccacggcgaggaccgcgacgcccccctgcacggcaggctgtgtgacttggtggtcccaccaacccgccggcaggaccatgcgtgcgaggctgcacacgagcaggaggtggagggtcacgacgagcgacatctggaataccgcttgccgttcggcgatggtggcgttgggaaagagcggtaggccggcacgggcagcggcgctcgacagcttccgcaagagcggtttggagacgaagtagtaggcgacgtacagcgccagcgctgtcgcgatgatgatcatcggtctgccaccgagctgacccgccgatagccgtttctgttccaccaatactggctgttgtagatcaggtggcccagaacacaggcccagatcccccagaagatgaacaggatagtccccaaggcggcgagcgggatcttggagaggacctgtccccgtccgaacaccgagtggccgcaagcaaacaagagtgctcccacagcggtgagcgcgagccaggccggggttgctcgcagactgatcaccgggaccccgacccggaagccgacctcttctcctacagcgatgactagcaactgccacagcggcatgttctgaacggagcgcgcgactcgggctcgagtcacccacacgggctgttgagcgctcacatcaccactcaggtaccccggtgaggcacttcgcttagtactggggcccgatgtgcgagcattcgtgatgtgtcgcaggatccggttgtcaagccaagaggccagcagggctccggcgacagtgacgggtagcccgatcagcacgaggccccagccatgcggtgccgagaggtttctggccggcgtgcacgcgaggcaggcaagtgccaacactgccagcactacgacgtagatggtcgcataattcgacttgcgggtgacgttgccgaccatcttggccaaagtcgctggggaccagctgatgagtgcgatggtggtcagcaggaagcaggaccagacagacatccggcgcactcaggggtatgggtgcggctgtgggttttggaaaccgccatatgcggcgtagcgggggtgtgcccgcatgggtgcgctgggcagtgacagggcgagcagcccaggcgcccagagcctgacacagtgcagtcccagcccctggatctctatggtggtgaaatcttcgatgtacaggggtgacacacaggtgatgctgttgaccacgctctttaccagttccgcccccgtgtgggtgtcgtcaggtggcaggtcttcggcttgggcaatggtgcccgcgtcgaatttcgccacaactgattgcgcggcctgatagttcctcgcgtagtaggagacgttcgagtcgaggtcaagcatgtcctccgtggacatactggacgcgtcggcctcggcgtcgaaagacgtccataccgcgagcatccgaaccccgctgcactcgagaaacgccttgtacatggctgcttccagacccgcgtctgcacctaggccgacggcgacgaggggaagttggttgccactaccgaccatcatgcatgccacggtgaaatgcttgagcccgggagtcggaagccagtagaaacgcagttcgtggcttcggcccgctgcacgttccacgagccgctggatgcgctggaggcggggtccttcgacgcggatgcgcacaggtgacgaggctccataccacaggcccatcgcggcatctacctggatcaattcataagccgcggacagcgttgcggcgacgcgtgaagtgtggacggcggtgccggtcgtcacggccgttcccagccacggctcaccgtcgtgccgacgggggttgtaacccaggtaaaagaactgcgccgggatccactcctgccgggaggtcccgacacggggagtcttgacccatgtcatgggcaagtcgtcgcgataggtgtcgaacgcacctccagccactcgttgcgcgaagccgaatgcgcccagatcgagaacttcgtcctcggtccgggcgaggagttcctgacgagtcgcccagcgccgttcgaagggactatggagaatcccggtacccgcgcagtagcgctcgacggcctccgcgtagaccttgatctctgcctcaaactcgttcagccccaccccaccgatgtggtagctacccggcttggggtcgggccggtcaagcagtgcgtgcatccccgtgagttccccaccgttcacccgcacgcgggggccgagcgcggggtgcagcgagtagccgacggaagtcaccagcccgcatagcgggctgtaggtgcgccgcctgagccgggctgcggtctcgacggggtcgctatcctggcgaagcttcatcgctcgccccctgccgccagccactcacggatgtcgtagtacaggtccggagcggtttcaacctgcgctggtgcatcaaaacgggacataggtaggacgtcgttgtaggcgatctccatcgtcggtatgtagaccgacaacactttgttgcgcgtcgtgttgaggccgttgcgggcgatgctgacagcctcatgcgcgacgtgcgcggccaagatcgcgcgcaccgacgctgccacggccggcgctccggcccttacgcggtcggcagcggccacccgcatccaggacaggtagctctgccgttcgcgcaggttcatcgcgacccgctgctcgaaggtccggtaggacgaggtcgcaccagggacgacgtagggacccacgtacaaggccggcccgtctacagctgcgtggagccacgacaggtgggcgcgtcgggcgaacaggtcaagggcgcgcagcatagccgggttgttctgcgccagcgctaccacaaggagtggctgcaggtccggcgccgaacccagcaacgccaacatctgggaggcctcctgctccatgtgcaactcgtcggccgactgctcaagccgcaggcctgcgaagagggtggctgatggctgcgtgtcgtcagcgaggacggtagcctgcagcccctctccctcgagaatctgctggatatcgccggcgaggagcgcgtcgtcgctgaatacccacaccgggcgcgtctctctacctccatccatcttgtcctcaacgttttcgaccagcgcaccgatcgatgctaggtgggccatcacgtcgtcaagggccgcgcgggtcaatccgggcacccgggacacgatctcgggcggctgcagtccttggctcaacaagtccaaggccggccacagggtcccggtggcgtcgtcgtcctccagcgttgtgctctcggcgttccagacgcctcgacggaactccaccctgtccatcgagtaaggcaccatcatgaggcccggtgaaatgtggttggtcagtttggctcctgtacagcctaggcttggacgcccacggtcatggtgtgggtcgcggtttggaaaatcccgtcgaggttgagtgcctgattgagttcgtcctcgtagaagcttgaggactcgactgaggcaagaccgagccccgtgcagaccaagttgatctgttgtgcgatcgccccgacttcttgaagggcgaacctcaaacccctggctccgtacttccgcatcgccctccacggcgagatgacgaacaccaagtgcactccggccgcatccgattgctccacggccggctcgccggccatcgaattcctcacgccgcgacagccctcttcaccggtcacgggcaccagtcgatcgatgaccggcgagtagcggtagacgccgcgactcaagccggacacccgttgtgcggacatgaagatagacacgggatacagccctccaccagacgggacagcgcgtacattataccgcacgatatcaccgctcgaacgtgggacatccacgtgccccgtcacaccggcagcacctctcagaaacgcagctacgtcacgcaggtctagggattcgccggtgtagttccgtccgctgcgccggcgggcgatcacttgctcgaggggtgcgcgcaccctgctggacctgggaagttcgatcacatcggcagcgaacgtgtcgcgatccatctgtccgtacgtaacgatcatggggtcaacgaaatagtcgccgaccgagacgttgaactccatatccccccgggcgatgcgcgaggcgagcaagaagtctgcagctgcgttagacagccccggcccatcagtgttgtcgcagcggaactcgtgggtccgaaaccccacaccttccgtgcccgggctctgcgctcgatacgacgtgatcgcagaactagccttccttaaaccgcccggagtagctaccatgaccgtcccctctgaggtctcccgaacacttgcgacaatagcagcatgtgggggcagccgccagaggcgggcatccttgtctcgacaaccattgacctccggattcgatatgtgcataatcatagtcgtgccaacacgaaacgtgtacgtctcggaagacgacctagacctgttcgccgaagccaccgagatcgctggaggcctgtccgcagcggtgttggaggccttgcgcagctacgtagacaggcaccatcgcgcggccggcggattcgacgagatcgagctggagctgcagaacgacggtatcgaccaccgtgtcaccttcatgggtcgccgcctgatacacatccgccgtccagatcccgagggaacccgcatagacactgtctacttgaccgccaaacaccaattcgccgttgccaccaaaatccaacgacggctgccagactggacgaccggccacgagcacatctggtccgacccggagacctggaatcgggagttctggatcgcaggtgacaagacgatggccgtgtatcccagccttgacaaactccgcgaagctgaccccaatgtggccgaacgcgccgaggccgcggtcaaaatcccgccgttcgaggtcctggacatctgatgacagaatcatcatcttcccggcggcaattggcaatgccggtgctgtcagtcacggatctagccaagaaatacgtggttcatggcggctacgaggtcccggcactcaacggtgtctcgtttgacctgcacccgggagagatgctgggtttgttcgggccaaacggtgctggaaagacgacgctggtcaggatcatcgcgggcctcttatcggcagattctggagacgtccactggggatcggatcaaggtcgggccaggttaggctacgtgtcccaaaagggtggactgcagtacgggctcacgtgccgggaagagatggtcttccacgcacaatgcttcggccagtccgccaagcaggcccggactagcgtcgacgaggtcgccgcgatgctgcactgcgattacctgatggagtgggacgtcggaaggctctccggtgggcaacgccgaatcatcgaggtagggctagcactcgtcaatcaaccatcggtcgtcctgctcgacgagcccaccctgggcctggaccccgcaacacgcctgtcgttgtggcaaacggtaaagtcggcacgccgtgagaccggtgctgccttcctcgtcaccacccactacattgacgaggtggccgagcacctgtccaacgtcagcgtgatcaaccacggaaccgtcgtcgccaacggctcgccagcgcacatccgagaaatgttcgcgaccggggaagtaacgctcggcgtggccgaggatacggtggacagtgcggtggacgtgttggctgggaccgcgttcgaggcgcaccccaccgaaaccgtcccggggatcgtggtcaggtccaggcatcccgacgtggacgcggccaagatcatcaccatcctggctggtcatggcatctcggtggactccatatccgtacgcgaggcgaccttggaagaggcgtttctcacgatcacaggcagtcgagacccggagaggcaaatcccatgaacacttgcttcaggcgatatgcggcgatgtcgctgagagcgcggcgtgatttggccctgacattcatccagcccctcgtctacctagccctcttcggaccgctcttcgtcacgacgatgaagatgtcgcagagagctaccgccgctacgggttactccctatacatcacgggcctgtccatccaaatggccatgacgatcggtgccttcgcggggctaaccatcatcctcgaataccgactcggcatcctcgaacggatctggagcacccccctcacggggagcaagatgatggcggggcgaatcgcgcgcgacgtcgttatgatgatgatgccgatactggtcgtcttcatcatcggcctggtgctgggaacacgccccagcccactgggcctggcgacctacttcgtgacagtgctcggcacaggagccacgttcgccggggtctcctacgcggtggcactcagaacgaagagcgaggcagcgctatccgcgatcttcaacctcatcctgctacccgtcctcctgctgtcggggatcatgctgcccatgtcgttcgcaccacactggatcgccaccgctgcccacgtgaacccgttgtggtacctggtgcaaggcgcgcggaaccagttcagcgttctagggctcgtggcggcggccccatggagttgggctgtggccatcgtcatgtcagccgctgccttcggctgggcaagccacgaattcaacaagaggcgctgacacaaagaatggtgccgggaacccaggtccccggcaccaccgagtgcactcgcgacgtcaacgcaccgttgcggtcactgcgcaggtcgagcacgaggacgacgagcccgcgctgctgcaggtcgagccgccaggcgcgagcaggtcgacgttagcgtcggcgccgccgaagacggacgtgacggccggctgagaggtgcggatgcggtgctccagcgaggaggtggtggtgagtttcatgggaggtgctcctaggagtgagacgagaacaaaccctagcgataggttagcagtccgcaaccgactccgggaatagtagaagcgcgcatccgtagcggaagaccttagcctgattacagtgaccctgttcgcgtctcaacattattccacacccccgagcagcgaacgacaccgcgatgatgatccgtcgcctctccaccgaagaactccgcgcccacatcgcaccgggccgccgtcccgtgcatcagacctgccgtcaacgtcggccatgaagctgggaaggtggctctcgtctaggagcagacgcgggacgcctcctccaggttgggccggggaagtgtccggttcttgatgtaggtggcggtccctattgatgggcgttgaccgtgggaatgcggtcggcgaagggggtggcgaacccgttgagcgcaggcttccagcgcatgcatcaacgctgtctgccggccaccggcaagcctcacccgcccgtcatggccatcatcgaggtgccggtgaatcctcgacacatgatcccaactcccccggaggggcttccggggctgttcagccaccagatcagccaggcggcgagcccgactctgccacccggaccctgcagagcgtgcctgctgccgtcgtgtcgtgtcgggccagtgggccaccagatcggccacatccgtcttggcccatctccagcccgccagacccagggaggccatcacctcatcgacgccgcgccgggtggtctcatcaaccccgtcaaacagctcgggccacctcgatgatgccgtccgtgaacgatccagattcatgacatgctcctcttcacagatgccgacgacgatcaggccgtggccgtggcaacggggtgacctgccggcgcggctcacgacgttgagccggaaccacacgagacgcaccagtgtgctgcgccgtcttgagtcgggcgctgtactgggccctggcgctgtggtgaacagcccgacgaagcaccgaccgccggctgtcctcatcgccagggcgaggcatggggcgcggcatggtgcgcccggtagcagcatccatgagggtgatccggtcagccaaaatgccgagccggttttcccacttccggggccacggcaccagcaggtcacgctgacagcccacgccgtggcgtcggcagtccacaacattttctcacggccaggatgcgagtgcagcagctccaccggaacaccagcatcacgcacccgccgcatcgtgacctcatcctcacgtgccaccagcgggggagagcgactaccgctgcagccggtccaaagcgactcttcacagatgagggggtggatcggtagctgacccctaggtcctgatgtgggtcgaggtccttggaatgatggaagttcctacacacccatcgccaaagacctcaacatggacaacgctaccttcaccactccctcatctgtgaagagccagtttatgcacggtgttgaaagaggcgtcggtctacgacgaatgcgggttaatggtcttgcggtgtggggcgctgggcgatggcatcgagaacgcgtgagtgggtggcgatccattcggccgcgtcggggttgatgttgcgggcgacggtgtcgatcgctgttacgtagtgggcaagcctgcgaatctcagcttgttggtcagggtgagcgctgatgaggggctcttgatgggaggcgcggttacggacgtggcggatgagctccacgttttcctcgaagtcgcgtcggctacgccccgggtagtgaggcatacctccgttacgtaagtcagtgagagctttccatacggttgcttccaggcgcggggtgagcagaaagcgccagttgtccagtgacagactcgccacgatctgatcaggggtcgcatcgagcctcgcgcgccgcagtcgcttctcggccctgtcgacgttacgcgggaaaccaccgagccgatagctcggggattcccaccaacgccgtatgccagtatcggcgctcaggcgcacgtcaatgaagtttctcaggagtacctcgacatggctgatgtcttccaagaacgctttcgagatgcgggtgttccacacgtaccacgcatcgactggttcgatccggtagcggctgagcctggcgggtgagaaccactcctgcaacgtctcacgactcaccgtgggagcgtggtaggattgatgacgataggcctcgggaaggtcaatgccgcgaaatatcggtatacccccgaggccattgttttgcccaggcccctcctcgcatacttgcggggcgtcattggctgccgtcatctcgtctcttcccggtacgtggctgtccatgttcacgggcaggtacggcaatgaggttcccgcacacaaacctctaccaagcatacgctggcaagcccccctctcggccccaccacaacatcaattgctgactcgaacacctttgaggcagcgctttcggcttgcgcaaccccatccacgacaccgtccgcttactactcgaagctgagggattcagaccccacctacaccctcgattgtgaagagcctccaaagcccgatacaacgtctggcgagacaccgtgaacgacctcgccaccgcagcaacgcaccagcagcgcgggatggcttggtattagcccagcgcagggccccaggcaccagccctaacgaccccgcacccgacgtggctagaggataagccgcacgggaggactccatacccgccgactcattccagcccgccaccagccgagccatatgatcaaccgcccgcggtaaataatccagccactcacgccggtcgtataaggaaccggccccgctccaggcgtgtgcccaggatcgccacaacacgtcgagctcgaccaccacgcccggaatagattcccactccaaatccggatcagcggccgccacgtaccagatcggccacatccgtcttggcccatctccagcccgccagacccagggaggccatcacctcatcgacgccgcgccgggtggtctcatcaaccccgtcaaacagctcgggccacctcgatgatgccgtccgtgaacgatccagattcatgacatgctcctcttcacagatgccgacgacgatcaggccgtggccgtggcaacggggtgacctgccggcgcggctcacgacgttgagccggaaccacacgagacgcaccagtgtgctgcgccgtcttgagtcgggcgctgtactgggccctggcgctgtggtgaacagcccgacgaagcaccgaccgccggctgtcctcatcgccagggcgaggcatggggcgcggcatggtgcgcccggtagcagcatccatgagggtgatccggtcagccaaaatgccgagccggttttcccacttccggggccacggcaccagcaggtcacgctgacagcccacgccgtggcgtcggcagtccacaacattttctcacggccaggatgcgagtgcagcagctccaccggaacaccagcatcacgcacccgccgcatcgtgacctcatcctcacgctgccgatcaccgtcaaccagatggtcagccacgatggtgttcacaccccatgactcatgcagttgcctggccaaggcgcccaacacctgctgacgcacctgtgacttgacgtcatcatcctccagatcctgtgtaccaaccatcacggaggccaacacatcactgcgttgctgaaccagggtgttgacgacgtcgacatcgtcgatacccatgggattgttggcgcgcgcggccacggcatgaaacgtgttggactgcaaattctcgaccagaccacgccgatagtcgttgaactgggaggtgtcggcaatgacaccggtcatgatgtaggccgacccctcggacaaggccctgtaggactcgtcgacgaacgccaccaaccccggccgccgccggtaaagtcgacctgcttcctcgtcagccagcaaccatgacagtttttgccccatatgtcctccttgctgacatgacctcgaacatggtaaactttccgtaggaaaaacggggcaagtactttcgagcggctacctcggcccccggtggaatgtccagccttgtgcggaccgaagccgggggattccttatgtttgcggcaatgatgccgctgcaccccctcatgccgtggtgtggtcctttccccgtgtgcggtgtggtgcgtcgttgactggtttgtggccccgagccttactctgaccggtaggagaacggtgtggggtctacggatagcccactcggctcccggtggaatgtccaacagggtagggttgatgagttggtccatcaggaccgtcccggtggctgcgtcaatgatcgatatttcgatgatgcgcccgtccaggtcggtggtttcggtgtcgaggatgactccgactccgggttctaggagttggggatccaatgggtggtcatcgtgtggctcctacagggagtgtctgggctggacagcggtgcaatacccgcgccatagcggttttttctgcgggggtgacccacagctggtatttcgttttgacggcgatttggcgggccacgtagtcgcatctgtaggccttgttagggggtagccaggtcgctgcatccctgtctcgtttggcctcattagcgggtccgtcgacagccagcaagttcaacgggtcgttggccagggcggtgcgttgcagcggtgagagtttttgcgcgccggtaatccacgcgttcccgagggctacgacgtggtcgatttggactgttgtcgaggtgtgccggccgcgccgccaggcgagtgtggacccggtgtaggggtcgtggagtcgcccggagacgaccacgcatcgtgatccgggtttcaggtgggcctcgaccaggtcgcgggcaagggcatcgttgcgggtgtcgcatccgttgtggccccaggggcgggtcaa

SEQ ID NO: 99 - DNA, 17173 bp, Propionibacterium acnes
gtgttccagtgcctcgcgggcgtgatgttcttcttcggcaccttcttgccacatgcttcgcgcttcagcctcgccatccaagcgaacctggactgtgaacgagtcctcatcgggtccgtcctcattccacgcggcaatgatcccacgggcctcgtctgcgacctgactcaacttcatcgcctgcccgacagccccgagagccggaatctcgaacacccagatattcgcctcagccgagacctcacgatgggcgatcacttcgtaggtcgtctcaccttctactgtcgtgtccattacttccactccttcggaattttcacgcctgctcgctccagctgtgccaggacaccaactgacgtcagctggtgtcctgctggtatcgatacgcgcccggctccgccggggcgtccccagatttcatggcttcccttggcgttccgcagacgggcccatccttgagaacggagcagcttgaggacgtccttagttttctgcggtttcacacatcatagtatagccccacttaacttgtaaactaagcccctgtttacattttagttggtgcatgtgatccctgctcttatgacgtcgcccgacctggcgccttagacatgcactgttcatcctcaaccacactcaccgtcacgggtccgaaggcgaggtctatcaccattcgcatcgatgaagttgaagcaggatcgtccgcatcacgcactgccgatccggacagacgccaccggccgtaccgactgtttacgatctgccaccgcagactgctgccataaccgctatcacctctgatagtacgtttagtactatcagaggtgattcaagattctcctgtcgagcagccctacagtcacgaagtcctgcgatcgtcatcgcttaaggcagacggatggccatcggggaccactcgcaaagcaggggcgatcagcaacagtgatgtgccatgagcaagtactggtgcaccggctgtttactccgcccctagataaaccacgggtgcaggggtggacaccacaccatgaccgatgtggtgcccaccccatggctcacaggcaggccctatcgccgggagcactgctgcagatgaggctcagtaacctgccatgtctcacctggggccaaggtgccaagctccccacggaatctcaggcatcggaaaccagcagccgaacttccacagcatgagcgccctacgaaaaagcaggccgccgacggttctcaagaactcgccggcggcctgcatcgccactcgaactgtaaccgtggtccgaccccgtgcacaggtaagctccacactcccaccaggcatggccgaggcagtaccaagttgccgtggcccatcggcagatttggttaaattttgaaaagtcatatagactccttctgtaaatttttaaatctcataggactctcgccatcgccagccagcttcgacaggagtcccgatgtttcaccgagtgaaatatcggcaccgtttgagttgacctaaagctcaaaagatgctagaatccatcttacctcgttaggggcgttttgtcaaacgcccctatattgcgtgtcttcgcgcgtcgtagcgctgatgctgcgcctgtgtcgactatccgtttgtaagtactttcgatgacaccagcagtggctactcatgactggtgcgtgcgggtctaaagcagcagggaaaggaatcgcagtagaagccgcttgattcctatcacccctgatggtactatcagtactaacagagcagggcttactcgatgcgtgagaatcggggacatgctgagcctctcgtaggtcattggcctgctgggcgtcagtgtggcgcggttcgatccagtgaactctatcagctctgttagtactgtcagagttgatatattcgaccccaggaggagcccatgagttacatcgttcgcaccggaaatttggtcgacacccccgagctgcgtgagggagagcatggcccgtacacctacgctcgcgtcatcgtgtccgatcgcattcgccaggaggacggcagctacgtcaacgggccagcgatcgcctacgacgtcttggcgggtggcagccaagccgtgaatctggttgaagccgccaaggcgagcggcaacatccgcatcatgttcgcgggccgttaccgcgtcaccgagtggcggggtgagcagggcactcgtatccagcatgaggtccgagccgacgaagtgagcgtgagcctgctcggtcagagggtgaccgtggagcggcctcgaggtgacgtggcatccaaggagagcacgtcgttctgattgagtccgggggcacggtggtcgccgtggtaaaccgtgcccctgacagtactattgacactattggaggtatcagtgtgactgctcaaattttcgccttgtgcaaccagaagggtggcgtcggaaagtcgacatcgacgtttcatctggcccgtgccgcggtgttgcgtggccagcgtgtgcttgtcgtcgacaacgacccccagggcaacctgacgtctgtcgcggccgccgagcccgtgggggaggatcaggcggggctggccgatgtgctcagcgcgcgtgctccagagaccctccgcgatgtgatcgtgccgggaatctggtctggcctcgatgtcgtgccgacgtctggcatcacgctcggctgggtgcgtgacgaactcgtgatcgccggtgccggccgagaaggccggctgcgggaggccctggccggcgtcgaggacgactacgacgtgatcctgatcgactgtgctccatcgctcgatcagctcacgatcaacggcctggtggccgcccagggtgtcatcgtcgtgacgcactcgaagttgtggagcgccaacggcctcgcccagctgctcgacaccatcgacagcgtgcgcagctactacaacggcgcgctgcgcgtggcgggcatcatcgtcaaccagcacgaggagaacaccatcagcgggaaaacctggctcgacgagctgcatcaggctgccgagtcccggaagctgaccgtgcttgacccgccgatccccaagcgtgtcgtcatcgccgataccgtcgaggccgcgcgcggtctcgacgagtggggaagtgccgaggcggccgcgctcggccagttgtacgcccaccacctgacctgcatcgaaggagccctgtgatgacccgtccagccccccgaaagtcctcattgagcggatcaactccggtcgccccgccggctcagacggcgccggcaccgtctgccgcacctaccccccacaaggccgatgagtcacagacgagcagcaccacgaggaagtggcggcacaaggtgtcgttctaccaggacccggccgacaccgaccgggtgcgcggggcgatcctttacacgatgacgaccgagggcaaccggaacctgagccagttcgtcaacgatgccgtcatggccaaggtggtcgagctggaagtcaagtacaacgatggccagccattccccgctgtgggagcccgaggactaccccagggcggtgcagccgccgccggtgagtagaggaccatcgaccgtcgggggcttcaccatgcccccgaccctcggtcatcctgatcctcttgtcgatggtggtgacagtgggggattcacgcctcgttcagatcagaggaagtctcaccgcgtgattagtactatcaaatctgacagtactaacagagcagatagggttccctaggtcgagctgtatcacgccgacaaccagtgagccagtgatctacgaggggcgcaatatgcacccgatcggtagccgcgaaggcctcgccctgccccgatagtactatcaccactatcaatggtgctagtggtgagtttcttccattgatgacaacagcacagtgctgccgtctgtgtgcgggccaccagcccgcacacagttgccgtcgaggacgttgttcatgctctgtggtggccggtcctgagggcggctcgcaggatctcccggcgctcacggcgacgagcctggtagccaaggtctgcatgttcggcggcgagacgggctttgagggttgcggcttctgcacggcggtggagttggtcgtcgatgagttgggcgcgggccagacgccgcttatgggggttgtcgtgggtgaggggggcgtcgaggctgccgtcgtgggttagggccagggctgctcgttcggcgtcgtcgaggccgatgtggtggacggtcacgggtgcggtggtgacgtcgaggatgtccaggtggatgttgtggccgccgccgggggcttcggggaagtctggtgggctggcctggccggtgtcggggtcataccaggacaggccgatgatctcggcccagggtgggggcgggcagacggctcgcagaagggtgtgggccaggaacgtgttgcgggccatgatgcctccaagggtgaaaagcagtcgagtagcgatgacggcggggtagccgtctgctgggctgaggccgaccgggcccatgtcctcgatgctcttgtgctgcggccataccccaaagctaccaaacagtctttttaatctcaaagatacaaacagtgcttgacatattatctgcagcgaaagatactttcatcatggtggctgatcatgattacgcgactcctgacgatgagtggatgacacctcctcaggtggcccgtgtgattccgaacaccactgctcaggctgtccggcgctgggctgaggagggtcagcttcctggggcgtttcgtactccttctgggcgttggcatattccgtggtcggctgtggtgggcatcatggggtttgatccgcgtgagtccgcatcaccgagtgatcgtcaccagagctgacagagtcgtcgatgagctttcgagtgcagagctgatggcacgacggtctggatacttgtggagatgagagacgaccacatccagtcatggtcggggtacaccgaggggcagattcagcagtgctggcacgatgaggttgcccctgccattgactcgctcatggagcaggtaaggtctgttgccgagactcctgtgccgccgggttcgagattttacggcgatgagcagtgggccaagccttttcatccgtctactgcgatctgcggttcaatgggtccgccagcgatcacttgcacgcgctgaagctcctcgtctgggaagcgaacgtccaccatgtctatgcgccgtacacccttgctcgtgcatctattgaggcatcgtctactgctgtgtggctgttgagcacgaagacgcgcggagaacgtgtgctgcgagccttgcgatggtacgcgcaggattgtcacgactcgtgcaggttcatggatgatgagcagtatcgtgaccacctattgcggcgcattgaggggactgtcgctgcgggaaatctcgactcgcgcgctgctaggaaacggtaccgtgcaaccgatgttgtcgatgaggctgatcagctggttcccggaactctgagggcgtggcgagctttttctggtatggcccattcccgtatgtgggcatccagggggctgctcgacatggaagtgctgtccagtggccaaggaatggttacggcgaaggtgacgagcggatcggcccaaatcctttgggccgtcgtggcagctctgaatgttgctctcagtgccgctcgcttgtggcgtgattcgatgtgctcaccgtttgctgttgcccagtcggtagacgcgatgccagaggcgtttcgccgccctgtttagggtctgatcggggtagtgggtgttcacggggtcccaggttggccatggggcggcttggtgatgtgagttgggttgtgtggcagcctgggtgttgggtgtggcttcgttggccacgaaggcatgctcttccttgtgctgggacttgagtccccagtgctctcccctttgctagtggggggtggggtccccggaggtaggtcctccggggactttttctatgtctgtccgtgccccaggatttcgtatctaggcagtaccaattttgggttagttggaggtttctttggtaatggacagggtgagggtgatgaagaggtggccgtccttggtggcagaaattttctcgaacttcagctgaatgttgttatcagccactatctgttgggcggtgaggtgctcggagagcttctggaatccttcgcggatccacaggttgtaggggttggtgaccgagaccgaagggtatgggtcgaccttcagcgtcaggactggctggtctgggttgagggagttgatcttcaccagtttggggtaccggtcgcactcatgtgtctcttgtgttgggggccagcagtcgggggcccattcctcccagtggtcacgcatctcacgaagtactttcctgcatctcagcctctgcaggagctcgcgcgccaccgatgggagggctgccatgatgagggcaaggactgcgaacccgatgatgtaattgaccgtgtccctcgtcacgccgttcttgccgaggattccgatggcgaacgcgatgacgacaccgcccaggcacaggtgcatggggtcatgctgtgatggtttttcttcttcagcgactggtggggctatagtcatgtgtgccccttagtactaagtgatactggtgggttgcttttccccggtggccgtgtgcaagacggccaccggggttttccttcatgttcctgattttatctgcccggtgtggcgttttcatctttgtgtgggtggttcgcctggggtcttggagtgtggtgacgcggtgatggtcacggtgacggtgactgtggcgcgtggcgggtgaggtggttctttcctggtctggtgtgtggcccaggtgagtgtggtgatgagggccagggtgaggatgatgaccagggtggggagtagtttgtctggccggtgtcgccgggcttggtggcgcggcatgtttttccagggtgtgtctccgaacaggtcgtcgtcggaggggtcgtcgtggttcatagggtggccttggcgatggtggtgggcgagtttggtccaggtgatggtgccgtcggaggcgatgtggcggtcggcgggcagggtgtggacggtccatccggcgtcggtgagggcggtggtgaaggatttcttgatggatcgtttgggtaggtcgatgggggcgtgggtgccgacccagatgcaccggtttttgaggtgggtggcgccgaggtggttcatgtcgcggaccatgttttgggtgagtgtgagggtgtcggggtcccattggacggggatgatgatgtggtctgcgatggtgatggcgtgttgccaggcggcgtcgaggtcgttgtttccggtgtcgaggatgatgacgtggaagcggcttcttagggcggtgatgatgcggtcgaggtcgtcggcggtggggggtgtgatgaggctgttgtggttgtcggtgatggtgggtaggcatgtgatggtggcccagccttctggttgccaggagatgtaggggccgaggtcgcggggttgggaggcgaatcctgggtgacgggctgcgcgggcgaggtcgatgacggtgttgtcggtgtggcggggtgcgcgggtggagagggtgccgcgtgggttgatttccacgacgacgatgtcgtcgtgtcctgctgtggtggcgagggcttgggcaaggatgacggccagcggggttttgccggtgccgcctttgaggttggcgagggtgatgatgtggtcggtgagttgggcgggtgcggcggtgtggtgagggttggcggtgaggttggcgatggtgaacagggcatcgagatcgtcggtggtgttctgctcggtgggttgggggtcgccggagatgatcgggtcggcgcggcgcggctgccatgccggcctcaccactgtcacgaccaccacgggtctgctggcgctgtgtgggtgtcgtcggcgatgactcacgatcggcagtctcaccatcgtctcggtgatgctcggctagcgctggacccggtcaagttcgggccggctcacccagtggtgatgactcggtcacagaaccgctgccggtcgttatctcggacgtctcgactcctccagtcctgatgggcgttggagccacctacacctactctcagaacgaccccgacctcgtgtggggcgggggcagatgtcacttgggccaatcgagagcccaggtgatggggaaagcaggggtgtgatatctgtcctggaaaactgggcagctgctaccgtggattgacggatctccacgaaagaagggaatgcgaccatgcagatcaccgtcaagaccatcaaagatcatcgggttcgcactgtccagaccgccatgagcagcgccttggggattggttcccaggtagacatgctcgcccccggcggttccaccagctcgagttccggttcatgctgctcgtgctcgacctgcgcggtagtggcgcagcctcaagactgaacggctggtcagccccaggggcgtggcgctcatcgcgtcacgccccttctattcgctggacagggtgcgcgagctgaggaacatcgcggtgtgtgcgatgacgaggggcaggagcaagtctgtgcgggttgccaagtagccctgcgcgatggccatcacgctggccccgacggcggcgaagacacctccgatacgtcgcttcatgccgccgaattgcatcaggacgaataggactcccgcggtccacatccctccgggcatgcatctgggaaagatgaaccggaagatgatctcttcacaggagagctggagtactagcagcgtagcccccacggggagactcacctctactgacagacggatcgtcttcatccacccacccgagctggcatcgaccatttcggtggccatgcgcgaccggtggcctcgtgcctctcgctgcgtgtcgatccagccgagcagtccgtggacgctctccgctaggactcctgacgcgacagtctcaccaattcctaagcccacggcgaggaccgcgacgcccccctgcacggcaggctgtgtgacttggtggtcccaccaacccgccggcaggaccatgcgtgcgaggctgcacacgagcaggaggtggagggtcacgacgagcgacatctggaataccgcttgccgttcggcgatggtggcgttgggaaagagcggtaggccggcacgggcagcggcgctcgacagcttccgcaagagcggtttggagacgaagtagtaggcgacgtacagcgccagcgctgtcgcgatgatgatcatcggtctgccaccgagctgacccgccgatagccgtttctgttccaccaatactggctgttgtagatcaggtggcccagaacacaggcccagatcccccagaagatgaacaggatagtccccaaggcggcgagcgggatcttggagaggacctgtccccgtccgaacaccgagtggccgcaagcaaacaagagtgctcccacagcggtgagcgcgagccaggccggggttgctcgcagactgatcaccgggaccccgacccggaagccgacctcttctcctacagcgatgactagcaactgccacagcggcatgttctgaacggagcgcgcgactcgggctcgagtcacccacacgggctgttgagcgctcacatcaccactcaggtaccccggtgaggcacttcgcttagtactggggcccgatgtgcgagcattcgtgatgtgtcgcaggatccggttgtcaagccaagaggccagcagggctccggcgacagtgacgggtagcccgatcagcacgaggccccagccatgcggtgccgagaggtttctggccggcgtgcacgcgaggcaggcaaatgccatcactgccagcactacgacgtagatggtcgcataattcgacttgcgggtgacgttgccgaccatcttggccaaagtcgctggggaccagctgatgagtgcgatggtggtcagcaggaagcaggaccagacagacatccggcgcactcaggggtatgggtgcggctgtgggttttggaaaccgccatatgcggcgtagcgggggtgtgcccgcatgggtgcgctgggcagtgacagggcgagcagcccaggcgcccagagcctgacacagtgcagtcccagcccctggatctctatggtggtgaaatcttcgatgtacaggggtgacacacaggtgatgctgttgaccacgctctttaccagttccgcccccgtgtgggtgtcgtcaggtggcaggtcttcggcttgggcaatggtgcccgcgtcgaatttcgccacaactgattgcgcggcctgatagttcctcgcgtagtaggagacgttcgagtcgaggtcaagcatgtcctccgtggacatactggacgcgtcggcctcggcgtcgaaagacgtccataccgcgagcatccgaaccccgctgcactcgagaaacgccttgtacatggctgcttccagacccgcgtctgcacctaggccgacggcgacgaggggaagttggttgccactaccgaccatcatgcatgccacggtgaaatgcttgagcccgggagtcggaagccagtagaaacgcagttcgtggcttcggcccgctgcacgttccacgagccgctggatgcgctggaggcggggtccttcgacgcggatgcgcacaggtgacgaggctccataccacaggcccatcgcggcatctacctggatcaattcataagccgcggacagcgttgcggcgacgcgtgaagtgtggacggcggtgccggtcgtcacggccgttcccagccacggctcaccgtcgtgccgacgggggttgtaacccaggtaaaagaactgcgccgggatccactcctgccgggaggtcccgacacggggagtcttgacccatgtcatgggcaagtcgtcgcgataggtgtcgaacgcacctccagccactcgttgcgcgaagccgaatgcgcccagatcgagaacttcgtcctcggtccgggcgaggagttcctgacgagtcgcccagcgccgttcgaagggactatggagaatcccggtacccgcgcagtagcgctcgacggcctccgcgtagaccttgatctctgcctcaaactcgttcagccccaccccaccgatgtggtagctacccggcttggggtcgggccggtcaagcagtgcgtgcatccccgtgagttccccaccgttcacccgcacgcgggggccgagcgcggggtgcagcgagtagccgacggaagtcaccagcccgcatagcgggctgtaggtgcgccgcctgagccgggctgcggtctcgacggggtcgctatcctggcgaagcttcatcgctcgccccctgccgccagccactcacggatgtcgtagtacaggtccggagcggtttcaacctgcgctggtgcatcaaaacgggacataggtaggacgtcgttgtaggcgatctccatcgtcggtatgtagaccgacaacactttgttgcgcgtcgtgttgaggccgttgcgggcgatgctgacagcctcatgcgcgacgtgcgcggccaagatcgcgcgcaccgacgctgccacggccggcgctccggcccttacgcggtcggcagcggccacccgcatccaggacaggtagctctgccgttcgcgcaggttcatcgcgacccgctgctcgaaggtccggtaggacgaggtcgcaccagggacgacgtagggacccacgtacaaggccggcccgtctacagctgcgtggagccacgacaggtgggcgcgtcgggcgaacaggtcaagggcgcgcagcatagccgggttgttctgcgccagcgctaccacaaggagtggctgcaggtccggcgccgaacccagcaacgccaacatctgggaggcctcctgctccatgtgcaactcgtcggccgactgctcaagccgcaggcctgcgaagagggtggctgatggctgcgtgtcgtcagcgaggacggtagcctgcagcccctctccctcgagaatctgctggatatcgccggcgaggagcgcgtcgtcgctgaatacccacaccgggcgcgtctctctacctccatccatcttgtcctcaacgttttcgaccagcgcaccgatcgatgctaggtgggccatcacgtcgtcaagggccgcgcgggtcaatccgggcacccgggacacgatctcgggcggctgcagtccttggctcaacaagtccaaggccggccacagggtcccggtggcgtcgtcgtcctccagcgttgtgctctcggcgttccagacgcctcgacggaactccaccctgtccatcgagtaaggcaccatcatgaggcccggtgaaatgtggttggtcactttggctcctgtacagcctaggcttggacgcccacggtcatggtgtgggtcgcggtttggaaaatcccgtcgaggttgagtgcctgattgagttcgtcctcgtagaagcttgaggactcgactgaggcaagaccgagccccgtgcagaccaagttgatctgttgtgcgatcgccccgacttcttgaagggcgaacctcaaacccctggctccgtacttccgcatcgccctccacggcgagatgacgaacaccaagtgcactccggccgcatccgattgctccacggccggctcgccggccatcgaattcctcacgccgcgacagccctcttcaccggtcacgggcaccagtcgatcgatgaccggcgagtagcggtagacgccgcgactcaagccggacacccgttgtgcggacatgaagatagacacgggatacagccctccaccagacgggacagcgcgtacattataccgcacgatatcaccgctcgaacgtgggacatccacgtgccccgtcacaccggcagcacctctcagaaacgcagctacgtcacgcaggtctagggattcgccggtgtagttccgtccgctgcgccggcgggcgatcacttgctcgaggggtgcgcgcaccctgctggacctgggaagttcgatcacatcggcagcgaacgtgtcgcgatccatctgtccgtacgtaacgatcatggggtcaacgaaatagtcgccgaccgagacgttgaactccatatccccccgggcgatgcgcgaggcgagcaagaagtctgcagctgcgttagacagccccggcccatcagtgttgtcgcagcggaactcgtgggtccgaaaccccacaccttccgtgcccgggctctgcgctcgatacgacgtgatcgcagaactagccttccttaaaccgcccggagtagctaccatgaccgtcccctctgaggtctcccgaacacttgcgacaatagcagcatgtgggggcagccgccagaggcgggcatccttgtctcgacaaccattgacctccggattcgatatgtgcataatcatagtcgtgccaacacgaaacgtgtacgtctcggaagacgacctagacctgttcgccgaagccaccgagatcgctggaggcctgtccgcagcggtgttggaggccttgcgcagctacgtagacaggcaccatcgcgcggccggcggattcgacgagatcgagctggagctgcagaacgacggtatcgaccaccgtgtcaccttcatgggtcgccgcctgatacacatccgccgtccagatcccgagggaacccgcatagacactgtctacttgaccgccaaacaccaattcgccgttgccaccaaaatccaacgacggctgccagactggacggccggccacgagcacatctggtccgacccggagacctggaatcgggagttctggatcgcaggtgacaagacgatggccgtgtatcccagccttgacaaactccgcgaagctgaccccaatgtggccgaacgcgccgaggccgcggtcaaaatcccgccgttcgaggtcctggacatctgatgacagaatcatcatcttcccggcggcaattggcaatgccggtgctgtcagtcacggatctagccaagaaatacgtggttcatggcggctacgaggtcccggcactcaacggtgtctcgtttgacctgcacccgggagagatgctgggtttgttcgggccaaacggtgctggaaagacgacgctggtcaggatcatcgcgggcctcttatcggcagattctggagacgtccactggggatcggatcaaggtcgggccaggttaggctacgtgtcccaaaagggtggactgcagtacgggctcacgtgccgggaagagatggtcttccacgcacaatgcttcggccagtccgccaagcaggcccggactagcgtcgacgaggtcgccgcgatgctgcactgcgattacctgatggagtgggacgtcggaaggctctccggtgggcaacgccgaatcatcgaggtagggctagcactcgtcaatcaaccatcggtcgtcctgctcgacgagcccaccctgggcctggaccccgcaacacgcctgtcgttgtggcaaacggtaaagtcggcacgccgtgagaccggtgctgccttcctcgtcaccacccactacattgacgaggtggccgagcacctgtccaacgtcagcgtgatcaaccacggaaccgtcgtcgccaacggctcgccagcgcacatccgagaaatgttcgcgaccggggaagtaacgctcggcgtggccgaggatacggtggacagtgcggtggacgtgttggctgggaccgcgttcgaggcgcaccccaccgaaaccgtcccggggatcgtggtcaggtccaggcatcccgacgtggacgcggccaagatcatcaccatcctggctggtcatggcatctcggtggactccatatccgtacgcgaggcgaccttggaagaggcgtttctcacgatcacaggcagtcgagacccggagaggcaaatcccatgaacacttgcttcaggcgatatgcggcgatgtcgctgagagcgcggcgtgatttggccctgacattcatccagcccctcgtctacctagccctcttcggaccgctcttcgtcacgacgatgaagatgtcgcagagagctaccgccgctacgggttactccctatacatcacgggcctgtccatccaaatggccatgacgatcggtgccttcgcggggctaaccatcatcctcgaataccgactcggcatcctcgaacggatctggagcacccccctcacggggagcaagatgatggcggggcgaatcgcgcgcgacgtcgttatgatgatgatgccgatactggtcgtcttcatcatcggcctggtgctgggaacacgccccagcccactgggcctggcgacctacttcgtgacagtgctcggcacaggagccacgttcgccggggtctcctacgcggtggcactcagaacgaagagcgaggcagcgctatccgcgatcttcaacctcatcctgctacccatcctcctgctgtcggggatcatgctgcccatgtcgttcgcaccacactggatcgccaccgctgcccacgtgaacccgttgtggtacctggtgcaaggcgcgcggaaccagttcagcgttctagggctcgtggcggcggccccatggagttgggctgtggccatcgtcatgtcagccgctgccttcggctgggcaagccacgaattcaacaagaggcgctgacacaaagaatggtgccgggaacccaggtccccggcaccaccgagtgcactcgcgacgtcaacgcaccgttgcggtcactgcgcaggtcgagcacgaggacgacgagcccgcgctgctgcaggtcgagccgccaggcgcgagcaggtcgacgttagcgtcggcgccgccgaagacggacgtgacggccggctgagaggtgcggatgcggtgctccagcgaggaggtggtggtgagtttcatgggaggtgctcctaggagtgagacgagaacaaaccctagcgataggttagcagtccgcaaccgactccgggaatagtagaagcgcgcatccgtagcggaagaccttagcctgattacagtgaccctgttcgcgtctcaacattattccacacccccgagcagcgaacgacaccgcgatgatgatccgtcgcctctccaccgaagaactccgcgcccacatcgcaccgggccgccgtcccgtgcatcagacctgccgtcaacgtcggccatgaagctgggaaggtggctctcgtctaggagcagacgcgggacgcctcctccaggttgggccggggaagtgtccggttcttgatgtaggtggcggtccctattgatgggcgttgaccgtgggaatgcggtcggcgaagggggtggcgaacccgttgagcgcaggcttccagcgcatgcatcaacgctgtctgccggccaccggcaagcctcacccgcccgtcatggccatcatcgaggtgccggtgaatcctcgacacatgatcccaactcccccggaggggcttccggggctgttcagccaccagatcagccaggcggcgagcccgactctgccacccggaccctgcagagcgtgcctgctgccgtcgtgtcgtgtcgggccagtgggccaccagatcggccacatccgtcttggcccatctccagcccgccagacccagggaggccatcacctcatcgacgccgcgccgggtggtctcatcaaccccgtcaaacagctcgggccacctcgatgatgccgtccgtgaacgatccagattcatgacatgctcctcttcacagatgccgacgacgatcaggccgtggccgtggcaacggggtgacctgccggcgcggctcacgacgttgagccggaaccacacgagacgcaccagtgtgctgcgccgtcttgagtcgggcgctgtactgggccctggcgctgtggtgaacagcccgacgaagcaccgaccgccggctgtcctcatcgccagggcgaggcatggggcgcggcatggtgcgcccggtagcagcatccatgagggtgatccggtcagccaaaatgccgagccggttttcccacttccggggccacggcaccagcaggtcacgctgacagcccacgccgtggcgtcggcagtccacaacattttctcacggccaggatgcgagtgcagcagctccaccggaacaccagcatcacgcacccgccgcatcgtgacctcatcctcacgtgccaccagcgggggagagcgactaccgctgcagccggtccaaagcgactcttcacagatgagggggtggatcggtagctgacccctaggtcctgatgtgggtcgaggtcct

SEQ ID NO: 100 - DNA, 599 bp, Propionibacterium acnes
accagatcggccacatccgtcttggcccatctccagcccgccagacccagggaggccatcacctcatcgacgccgcgccgggtggtctcatcaaccccgtcaaacagctcgggccacctcgatgatgccgtccgtgaacgatccagattcatgacatgctcctcttcacagatgccgacgacgatcaggccgtggccgtggcaacggggtgacctgccggcgcggctcacgacgttgagccggaaccacacgagacgcaccagtgtgctgcgccgtcttgagtcgggcgctgtactgggccctggcgctgtggtgaacagcccgacgaagcaccgaccgccggctgtcctcatcgccagggcgaggcatggggcgcggcatggtgcgcccggtagcagcatccatgagggtgatccggtcagccaaaatgccgagccggttttcccacttccggggccacggcaccagcaggtcacgctgacagcccacgccgtggcgtcggcagtccacaacattttctcacggccaggatgcgagtgcagcagctccaccggaacaccagcatcacgcacccgccgcatcgtgacctcatcctcacg

SEQ ID NO: 101 - DNA, 17175 bp, Propionibacterium acnes
gtgttccagtgcctcgcgggcgtgatgttcttcttcggcaccttcttgccacatgcttcgcgcttcagcctcgccatccaagcgaacctggactgtgaacgagtcctcatcgggtccgtcctcattccacgcggcaatgatcccacgggcctcgtctgcgacctgactcaacttcatcgcctgcccgacagccccgagagccggaatctcgaacacccagatattcgcctcagccgagacctcacgatgggcgatcacttcgtaggtcgtctcaccttctactgtcgtgtccattacttccactccttcggaattttcacgcctgctcgctccagctgtgccaggacaccaactgacgtcagctggtgtcctgctggtatcgatacgcgcccggctccgccggggcgtccccagatttcatggcttcccttggcgttccgcagacgggcccatccttgagaacggagcagcttgaggacgtccttagttttctgcggtttcacacatcatagtatagccccacttaacttgtaaactaagcccctgtttacattttagttggtgcatgtgatccctgctcttatgacgtcgcccgacctggcgccttagacatgcactgttcatcctcaaccacactcaccgtcacgggtccgaaggcgaggtctatcaccattcgcatcgatgaagttgaagcaggatcgtccgcatcacgcactgccgatccggacagacgccaccggccgtaccgactgtttacgatctgccaccgcaggctgctgccataaccgctatcacctctgatagtacttttagtactatcagaggtgattcaagattctcctgtcgagcagccctacagtcacgaagtcctgcgatcgtcatcgcttaaggcagacggatggccatcggggaccactcgcaaagcaggggcgatcagcaacagtgatgtgccatgagcaagtactggtgcaccggctgtttactccgcccctagataaaccacgggtgcaggggtggacaccacaccatgaccgatgtggtgcccaccccatggctcacaggcaggccctatcgccgggagcactgctgcagatgaggctcagtaacctgccatgtctcacctggggccaaggtgccaagctccccacggaatctcaggcatcggaaaccagcagccgaacttccacagcatgagcgccctacgaaaaagcaggccgccgacggttctcaagaactcgccggcggcctgcatcgcaactcgaactgtaaccgtggtccgaccccgtgcacaggtaagctccacactcccaccaggcatggccgaggcagtaccaagttgccgtggcccatcggcagatttggttaaattttgaaaagtcatatagactccttctgtaaatttttaaatctcataggactctcgccatcgccagccagcttcgacaggagtcccgatgtttcaccgagtgaaatatcggcaccgtttgagttgacctaaagctcaaaagatgctagaatccatcttacctcgttaggggcgttttttcaaacgcccctatattgcgtgtcttcgcgcgtcgtagcgctgatgctgcgcctgtgtcgactatccgtttgtaagtactttcgatgacaccagcagtggctactcatgactggtgcgtgcgggtctaaagcagcagggaaaggaatcgcagtagaagccgcttgattcctatcacccctgatggtactatcagtactaacagagcagggcttactcgatgcgtgagaatcggggacatgctgagcctctcgtaggtcattggcctgctgggcgtcagtgtggcgcggttcgatccagtgaactctatcagctctgttagtactgtcagagttgatatattcgaccccaggaggagcccatgagttacatcgttcgcaccggaaatttggtcgacacccccgagctgcgtgagggagagcatggcccgtacacctacgctcgcgtcatcgtgtccgatcgcattcgccaggaggacggcagctacgtcaacgggccagcgatcgcctacgacgtcttggcgggtggcagccaagccgtgaatctggttgaagccgccaaggcgagcggcaacatccgcatcatgttcgcgggccgttaccgcgtcaccgagtggcggggtgagcagggcactcgtatccagcatgaggtccgagccgacgaagtgagcgtgagcctgctcggtcagagggtgaccgtggagcggcctcgaggtgacgtggcatccaaggagagcacgtcgttctgattgagtccgggggcacggtggtcgccgtggtaaaccgtgcccctgacagtactattgacactattggaggtatcagtgtgactgttcaaattttcgccttgtgcaaccagaagggtggcgtcggaaagtcgacatcgacgtttcatctggcccgtgccgcggtgttgcgtggccagcgtgtgcttgtcgtcgacaacgacccccagggcaacctgacgtctgtcgcggccgccgagcccgtgggggaggatcaggcggggctggccgatgtgctcagcgcgcgtgctccagagaccctccgcgatgtgatcgtgccgggaatctggtctggcctcgatgtcgtgccgacgtctggcatcacgctcggctgggtgcgtgacgaactcgtgatcgccggtgccggccgagaaggccggctgcgggaggccctggccggcgtcgaggacgactacgacgtgatcctgatcgactgtgctccatcgctcgatcagctcacgatcaacggcctggtggccgcccagggtgtcatcgtcgtgacgcactcgaagttgtggagcgccaacggcctcgcccagctgctcgacaccatcgacagcgtgcgcagctactacaacggcgcgctgcgcgtggcgggcatcatcgtcaaccagcacgaggagaacaccatcagcgggaaaacctggctcgacgagctgcatcaggctgccgagtcccggaagctgaccgtgcttgacccgccgatccccaagcgtgtcgtcatcgccgataccgtcgaggccgcgcgcggtctcgacgagtggggaagtgccgaggcggccgcgctcggccagttgtacgcccaccacctgacctgcatcgaaggagccctgtgatgacccgtccagccccccgaaagtcctcattgagcggatcaactccggtcgccccgccggctcagacggcgccggcaccgtctgccgcacctaccccccacaaggccgatgagtcacagacgagcagcaccacgaggaagtggcggcacaaggtgtcgttctaccaggacccggccgacaccgaccgggtgcgcggggcgatcctttacacgatgacgaccgagggcaaccggaacctgagccagttcgtcaacgatgccgtcatggccaaggtggtcgagctggaagtcaagtacaacgatggccagccattccccgctgtgggagcccgaggactaccccagggcggtgcagccgccgccggtgagtagaggaccatcgaccgtcgggggcttcaccatgcccccgaccctcggtcatcctgatcctcttgtcgatggtggtgacagtgggggattcacgcctcgttcagatcagaggaagtctcaccgcgtgattagtactatcaaatctgacagtactaacagagcagatagggttccctaggtcgagctgtatcacgccgacaaccagtgagccagtgatctacgaggggcgcaatatgcacccgatcggtagccgcgaaggcctcgccctgccccgatagtactatcaccactatcaatggtgctagtggtgagtttcttccattgatgacaacagcacagtgctgccgtctgtgtgcgggccaccagcccgcacacagttgccgtcgaggacgttgttcatgctctgtggtggccggtcctgagggcggctcgcaggatctcccggcgctcacggcgacgagcctggtagccaaggtctgcatgttcggcggcgagacgggctttgagggttgcggcttctgcacggcggtggagttggtcgtcgatgagttgggcgcgggccagacgccgcttatgggggttgtcgtgggtgagggtggcgtcgaggctgccgtcgtgggttagggccagggctgctcgttcggcgtcgtcgaggccgatgtggtggacggtcacgggtgcggtggtgacgtcgaggatgtccaggtggatgttgtggccgccgccgggggcttcggggaagtctggtgggctggcctggccggtgtcggggtcataccaggacaggccgatgatctcggcccagggtgggggcgggcagacggctcgcagaagggtgtgggccaggaacgtgttgcgggccatgatgcctccaagggtgaaaagcagtcgagtagcgatgacggcggggtagccgtctgctgggctgaggccgaccgggcccatgtcctcgatgctcttgtgctgcggccataccccaaagctaccaaacagtctttttaatctcaaagatacaaacagtgcttgacatattatctgcagcgaaagatactttcatcatggtggctgatcatgattacgcgactcctgacgatgagtggatgacacctcctcaggtggcccgtgtgattccgaacaccactgctcaggctgtccggcgctgggctgaggagggtcagcttcctggggcgtttcgtactccttctgggcgttggcatattccgtggtcggctgtggtgggcatcatggggtttgatccgcgtgagtccgcatcaccgagtgatcgtcaccagagctgacagagtcgtcgatgagctttcgagtgcagagctgatggcacgacggtctggatacttgtggagatgagagacgaccacatccagtcatggtcggggtacaccgaggggcagattcagcagtgctggcacgatgaggttgcccctgccattgactcgctcatggagcaggtaaggtctgttgccgagactcctgtgccgccgggttcgagattttacggcgatgagcagtgggccaagccttttcatccgtctactgcgatctgcggttcaatgggtccgccagcgatcacttgcacgcgctgaagctcctcgtctgggaagcgaacgtccaccatgtctatgcgccgtacacccttgctcgtgcatctattgaggcatcgtctactgctgtgtggctgttgagcacgaagacgcgcggagaacgtgtgctgcgagccttgcgatggtacgcgcaggattgtcacgactcgtgcaggttcatggatgatgagcagtatcgtgaccacctattgcggcgcattgaggggactgtcgctgcgggaaatctcgactcgcgcgctgctaggaaacggtaccgtgcaaccgatgttgtcgatgaggctgatcagctggttcccggaactctgagggcgtggcgagctttttctggtatggcccattcccgtatgtgggcatccagggggctgctcgacatggaagtgctgtccagtggccaaggaatggttacggcgaaggtgacgagcggatcggcccaaatcctttgggccgtcgtggcagctctgaatgttgctctcagtgccgctcgcttgtggcgtgattcgatgtgctcaccgtttgctgttgcccagtcggtagacgcgatgccagaggcgtttcgccgccctgtttagggtctgatcggggtagtgggtgttcacggggtcccaggttggccatggggcggcttggtgatgtgagttgggttgtgtggcagcctgggtgttgggtgtggcttcgttggccacgaaggcatgctcttccttgtgctgggacttgagtccccagtgctctcccctttgctagtggggggtggggtccccggaggtaggtcctccggggactttttctatgtctgtccgtgccccaggatttcgtatctaggcagtaccaattttgggttagttggaggtttctttggtaatggacagggtgagggtgatgaagaggtggccgtccttggtggcagaaattttctcgaacttcagctgaatgttgttatcagccactatctgttgggcggtgaggtgctcggagagcttctggaatccttcgcggatccacaggttgtaggggttggtgaccgagaccgaagggtatgggtcgaccttcagcgtcaggactggctggtctgggttgagggagttgatcttcaccagtttggggtaccggtcgcactcatgtgtctcttgtgttgggggccagcagtcgggggcccattcctcccagtggtcacgcatctcacgaagtactttcctgcatctcagcctctgcaggagctcgcgcgccaccgatgggagggctgccatgatgagggcaaggactgcgaacccgatgatgtaattgaccgtgtccctcgtcacgccgttcttgccgaggattccgatggcgaacgcgatgacgacaccgcccaggcacaggtgcatggggtcatgctgtgatggtttttcttcttcagcgactggtggggctatagtcatgtgtgccccttagtactaagtgatactggtgggttgcttttccccggtggccgtgtgcaagacggccaccggggttttccttcatgttcctgattttatctgcccggtgtggcgttttcatctttgtgtgggtggttcgcctggggtcttggagtgtggtgacgcggtgatggtcacggtgacggtgactgtggcgcgtggcgggtgaggtggttctttcctggtctggtgtgtggcccaggtgagtgtggtgatgagggccagggtgaggatgatgaccagggtggggagtagtttgtctggccggtgtcgccgggcttggtggcgcggcatgtttttccagggtgtgtctccgaacaggtcgtcgtcggaggggtcgtcgtggttcatagggtggccttggcgatggtggtgggcgagtttggtccaggtgatggtgccgtcggaggcgatgtggcggtcggcgggcagggtgtggacggtccatccggcgtcggtgagggcggtggtgaaggatttcttgatggatcgtttgggtaggtcgatgggggcgtgggtgccgacccagatgcaccggtttttgaggtgggtggcgccgaggtggttcatgtcgcggaccatgttttgggtgagtgtgagggtgtcggggtcccattggacggggatgatgatgtggtctgcgatggtgatggcgtgttgccaggcggcgtcgaggtcgttgtttccggtgtcgaggatgatgacgtggaagcggcttcttagggcggtgatgatgcggtcgaggtcgtcggcggtggggggtgtgatgaggctgttgtggttgtcggtgatggtgggtgggcatgtgatggtggcccagccttctggttgccaggagatgtaggggtcgaggtcgcggggttgggaggcgaatcctgggtgacgggctgcgcgggcgaggtcgatgacggtgttgtcggtgtggcggggtgcgcgggtggagagggtgccgcgtgggttgatttccacgacgacgatgtcgtcgtgtcctgctgtggtggcgagggcttgggcaaggatgacggccagcggggttttgccggtgccgcctttgaggttggcgagggtgatgatgtggtcggtgagttgggcgggtgcggcggtgtggtgagggttggcggtgaggttggcgatggtgaacagggcatcgagatcgtcggtggtgttctgctcggtgggttgggggtcgccggagatgatcgggtcggcgcggcgcggctgccatgccggcctcaccactgtcacgaccaccacgggtctgctggcgctgtgtgggtgtcgtcggcgatgactcacgatcggcagtctcaccatcgtctcggtgatgctcggctagcgctggacccggtcaagttcgggccggctcacccagtggtgatgactcggtcacagaaccgctgccggtcgttatctcggacgtctcgactcctccagtcctgatgggcgttggagccacctacacctactctcagaacgaccccgacctcgtgtggggcgggggcagatgtcacttgggccaatcgagagcccaggtgatggggaaagcaggggtgtgatatctgtcctggaaaactgggcagctgctaccgtggattgacggatctccacgaaagaagggaatgcgaccatgcagatcaccgtcaagaccatcaaagatcatcgggttcgcactgtccagaccgccatgagcagcgccttggggattggttcccaggtagacatgctcgcccccggcggttccaccagctcgagttccggttcatgctgctcgtgctcgacctgcgcggtagtggcgcagcctcaagactgaacggctggtcagccccaggggcgtggcgctcatcgcgtcacgccccttctattcgctggacagggtgcgcgagctgaggaacatcgcggtgtgtgcgatgacgaggggcaggagcaagtctgtgcgggttgccaagtagccctgcgcgatggccatcacgctggccccgacggcggcgaagacacctccgatacgtcgcttcatgccgccgaattgcatcaggacgaataggactcccgcggtccacatccctccgggcatgcatctgggaaagatgaaccggaagatgatctcttcacaggagagctggagtactagcagcgtagcccccacggggagactcacctctactgacagacggatcgtcttcatccacccacccgagctggcatcgaccatttcggtggccatgcgcgaccggtggcctcgtgcctctcgctgcgtgtcgatccagccgagcagtccgtggacgctctccgctaggactcctgacgcgacagtctcaccaattcctaagcccacggcgaggaccgcgacgcccccctgcacggcaggctgtgtgacttggtggtcccaccaacccgccggcaggaccatgcgtgcgaggctgcacacgagcaggaggtggagggtcacgacgagcgacatctggaataccgcttgccgttcggcgatggtggcgttgggaaagagcggtaggccggcacgggcagcggcgctcgacagcttccgcaagagcggtttggagacgaagtagtaggcgacgtacagcgccagcgctgtcgcgatgatgatcatcggtctgccaccgagctgacccgccgatagccgtttctgttccaccaatactggctgttgtagatcaggtggcccagaacacaggcccagatcccccagaagatgaacaggatagtccccaaggcggcgagcgggatcttggagaggacctgtccccgtccgaacaccgagtggccgcaagcaaacaagagtgctcccacagcggtgagcgcgagccaggccggggttgctcgcagactgatcaccgggaccccgacccggaagccgacctcttctcctacagcgatgactagcaactgccacagcggcatgttctgaacggagcgcgcgactcgggctcgagtcacccacacgggctgttgagcgctcacatcaccactcaggtaccccggtgaggcacttcgcttagtactggggcccgatgtgcgagcattcgtgatgtgtcgcaggatccggttgtcaagccaagaggccagcagggctccggcgacagtgacgggtagcccgatcagcacgaggccccagccatgcggtgccgagaggtttctggccggcgtgcacgcgaggcaggcaagtgccaacactgccagcactacgacgtagatggtcgcataattcgacttgcgggtgacgttgccgaccatcttggccaaagtcgctggggaccagctgatgagtgcgatggtggtcagcaggaagcaggaccagacagacatccggcgcactcaggggtatgggtgcggctgtgggttttggaaaccgccatatgcggcgtagcgggggtgtgcccgcatgggtgcgctgggcagtgacagggcgagcagcccaggcgcccagagcctgacacagtgcagtcccagcccctggatctctatggtggtgaaatcttcgatgtacaggggtgacacacaggtgatgctgttgaccacgctctttaccagttccgcccccgtgtgggtgtcgtcaggtggcaggtcttcggcttgggcaatggtgcccgcgtcgaatttcgccacaactgattgcgcggcctgatagttcctcgcgtagtaggagacgttcgagtcgaggtcaagcatgtcctccgtggacatactggacgcgtcggcctcggcgtcgaaagacgtccataccgcgagcatccgaaccccgctgcactcgagaaacgccttgtacatggctgcttccagacccgcgtctgcacctaggccgacggcgacgaggggaagttggttgccactaccgaccatcatgcatgccacggtgaaatgcttgagcccgggagtcggaagccagtagaaacgcagttcgtggcttcggcccgctgcacgttccacgagccgctggatgcgctggaggcggggtccttcgacgcggatgcgcacaggtgacgaggctccataccacaggcccatcgcggcatctacctggatcaattcataagccgcggacagcgttgcggcgacgcgtgaagtgtggacggcggtgccggtcgtcacggccgttcccagccacggctcaccgtcgtgccgacgggggttgtaacccaggtaaaagaactgcgccgggatccactcctgccgggaggtcccgacacggggagtcttgacccatgtcatgggcaagtcgtcgcgataggtgtcgaacgcacctccagccactcgttgcgcgaagccgaatgcgcccagatcgagaacttcgtcctcggtccgggcgaggagttcctgacgagtcgcccagcgccgttcgaagggactatggagaatcccggtacccgcgcagtagcgctcgacggcctccgcgtagaccttgatctctgcctcaaactcgttcagccccaccccaccgatgtggtagctacccggcttggggtcgggccggtcaagcagtgcgtgcatccccgtgagttccccaccgttcacccgcacgcgggggccgagcgcggggtgcagcgagtagccgacggaagtcaccagcccgcatagcgggctgtaggtgcgccgcctgagccgggctgcggtctcgacggggtcgctatcctggcgaagcttcatcgctcgccccctgccgccagccactcacggatgtcgtagtacaggtccggagcggtttcaacctgcgctggtgcatcaaaacgggacataggtaggacgtcgttgtaggcgatctccatcgtcggtatgtagaccgacaacactttgttgcgcgtcgtgttgaggccgttgcgggcgatgctgacagcctcatgcgcgacgtgcgcggccaagatcgcgcgcaccgacgctgccacggccggcgctccggcccttacgcggtcggcagcggccacccgcatccaggacaggtagctctgccgttcgcgcaggttcatcgcgacccgctgctcgaaggtccggtaggacgaggtcgcaccagggacgacgtagggacccacgtacaaggccggcccgtctacagctgcgtggagccacgacaggtgggcgcgtcgggcgaacaggtcaagggcgcgcagcatagccgggttgttctgcgccagcgctaccacaaggagtggctgcaggtccggcgccgaacccagcaacgccaacatctgggaggcctcctgctccatgtgcaactcgtcggccgactgctcaagccgcaggcctgcgaagagggtggctgatggctgcgtgtcgtcagcgaggacggtagcctgcagcccctctccctcgagaatctgctggatatcgccggcgaggagcgcgtcgtcgctgaatacccacaccgggcgcgtctctctacctccatccatcttgtcctcaacgttttcgaccagcgcaccgatcgatgctaggtgggccatcacgtcgtcaagggccgcgcgggtcaatccgggcacccgggacacgatctcgggcggctgcagtccttggctcaacaagtccaaggccggccacagggtcccggtggcgtcgtcgtcctccagcgttgtgctctcggcgttccagacgcctcgacggaactccaccctgtccatcgagtaaggcaccatcatgaggcccggtgaaatgtggttggtcactttggctcctgtacagcctaggcttggacgcccacggtcatggtgtgggtcgcggtttggaaaatcccgtcgaggttgagtgcctgattgagttcgtcctcgtagaagcttgaggactcgactgaggcaagaccgagccccgtgcagaccaagttgatctgttgtgcgatcgccccgacttcttgaagggcgaacctcaaacccctggctccgtacttccgcatcgccctccacggcgagatgacgaacaccaagtgcactccggccgcatccgattgctccacggccggctcgccggccatcgaattcctcacgccgcgacagccctcttcaccggtcacgggcaccagtcgatcgatgaccggcgagtagcggtagacgccgcgactcaagccggacacccgttgtgcggacatgaagatagacacgggatacagccctccaccagacgggacagcgcgtacattataccgcacgatatcaccgctcgaacgcgggacatccacgtgccccgtcacaccggcagcacctctcagaaacgcagctacgtcacgcaggtctagggattcgccggtgtagttccgtccgctgcgccggcgggcgatcacttgctcgaggggtgcgcgcaccctgctggacctgggaagttcgatcacatcggcagcgaacgtgtcgcgatccatctgtccgtacgtaacgatcatggggtcaacgaaatagtcgccgaccgagacgttgaactccatatccccccgggcgatgcgcgaggcgagcaagaagtctgcagctgcgttagacagccccggcccatcagtgttgtcgcagcggaactcgtgggtccgaaaccccacaccttccgtgcccgggctctgcgctcgatacgacgtgatcgcagaactagccttccttaaaccgcccggagtagctaccatgaccgtcccctctgaggtctcccgaacacttgcgacaatagcagcatgtgggggcagccgccagaggcgggcatccttgtctcgacaaccattgacctccggattcgatatgtgcataatcatagtcgtgccaacacgaaacgtgtacgtctcggaagacgacctagacctgttcgccgaagccaccgagatcgctggaggcctgtccgcagcggtgttggaggccttgcgcagctacgtagacaggcaccatcgcgcggccggcggattcgacgagatcgagctggagctgcagaacgacggtatcgaccaccgtgtcaccttcatgggtcgccgcctgatacacatccgccgtccagatcccgagggaacccgcatagacactgtctacttgaccgccaaacaccaattcgccgttgccaccaaaatccaacgacggctgccagactggacgaccggccacgagcacatctggtccgacccggagacctggaatcgggagttctggatcgcaggtgacaagacgatggccgtgtatcccagccttgacaaactccgcgaagctgaccccaatgtggccgaacgcgccgaggccacggtcaaaatcccgccgttcgaggtcctggacatctgatgacagaatcatcatcttcccggcggcaattggcaatgccggtgctgtcagtcacggatctagccaagaaatacgtggttcatggcggctacgaggtcccggcactcaacggtgtctcgtttgacctgcacccgggagagatgctgggtttgttcgggccaaacggtgctggaaagacgacgctggtcaggatcatcgcgggcctcttatcggcagattctggagacgtccactggggatcggatcaaggtcgggccaggttaggctacgtgtcccaaaagggtggactgcagtacgggctcacgtgccgggaagagatggtcttccacgcacaatgcttcggccagtccgccaagcaggcccggactagcgtcgacgaggtcgccgcgatgctgcactgcgattacctgatggagtgggacgtcggaaggctctccggtgggcaacgccgaatcatcgaggtagggctagcactcgtcaatcaaccatcggtcgtcctgctcgacgagcccaccctgggcctggaccccgcaacacgcctgtcgttgtggcaaacggtaaagtcggcacgccgtgagaccggtgctgccttcctcgtcaccacccactacattgacgaggtggccgagcacctgtccaacgtcagcgtgatcaaccacggaaccgtcgtcgccaacggctcgccagcgcacatccgagaaatgttcgcgaccggggaagtaacgctcggcgtggccgaggatacggtggacagtgcggtggacgtgttggctgggaccgcgttcgaggcgcaccccaccgaaaccgtcccggggatcgtggtcaggtccaggcatcccgacgtggacgcggccaagatcatcaccatcctggctggtcatggcatctcggtggactccatatccgtacgcgaggcgaccttggaagaggcgtttctcacgatcacaggcagtcgagacccggagaggcaaatcccatgaacacttgcttcaggcgatatgcggcgatgtcgctgagagcgcggcgtgatttggccctgacattcatccagcccctcgtctacctagccctcttcggaccgctcttcgtcacgacgatgaagatgtcgcagagagctaccgccgctacgggttactccctatacatcacgggcctgtccatccaaatggccatgacgatcggtgccttcgcggggctaaccatcatcctcgaataccgactcggcatcctcgaacggatctggagcacccccctcacggggagcaagatgatggcggggcgaatcgcgcgcgacgtcgttatgatgatgatgccgatactggtcgtcttcatcatcggcctggtgctgggaacacgccccagcccactgggcctggcgacctacttcgtgacagtgctcggcacaggagccacgttcgccggggtctcctacgcggtggcactcagaacgaagagcgaggcagcgctatccgcgatcttcaacctcatcctgctacccatcctcctgctgtcggggatcatgctgcccatgtcgttcgcaccacactggatcgccaccgctgcccacgtgaacccgttgtggtacctggtgcaaggcgcgcggaaccagttcagcgttctagggctcgtggcggcggccccatggagttgggctgtggccatcgtcatgtcagccgctgccttcggctgggcaagccacgaattcaacaagaggcgctgacacaaagaatggtgccgggaacccaggtccccggcaccaccgagtgcactcgcgacgtcaacgcaccgttgcggtcactgcgcaggtcgagcacgaggacgacgagcccgcgctgctgcaggtcgagccgccaggcgcgagcaggtcgacgttagcgtcggcgccgccgaagacggacgtgacggccggctgagaggtgcggatgcggtgctccagcgaggaggtggtggtgagtttcatgggaggtgctcctaggagtgagacgagaacaaaccctagcgataggttagcagtccgcaaccgactccgggaatagtagaagcgcgcatccgtagcggaagaccttagcctgattacagtgaccctgttcgcgtctcaacattattccacacccccgagcagcgaacgacaccgcgatgatgatccgtcgcctctccaccgaagaactccgcgcccacatcgcaccgggccgccgtcccgtgcatcagacctgccgtcaacgtcggccatgaagctgggaaggtggctctcgtctaggagcagacgcgggacgcctcctccaggttgggccggggaagtgtccggttcttgatgtaggtggcggtccctattgatgggcgttgaccgtgggaatgcggtcggcgaagggggtggcgaacccgttgagcgcaggcttccagcgcatgcatcaacgctgtctgccggccaccggcaagcctcacccgcccgtcatggccatcatcgaggtgccggtgaatcctcgacacatgatcccaactcccccggaggggcttccggggctgttcagccaccagatcagccaggcggcgagcccgactctgccacccggaccctgcagagcgtgcctgctgccgtcgtgtcgtgtcgggccagtgggccaccagatcggccacatccgtcttggcccatctccagcccgccagacccagggaggccatcacctcatcgacgccgcgccgggtggtctcatcaaccccgtcaaacagctcgggccacctcgatgatgccgtccgtgaacgatccagattcatgacatgctcctcttcacagatgccgacgacgatcaggccgtggccgtggcaacggggtgacctgccggcgcggctcacgacgttgagccggaaccacacgagacgcaccagtgtgctgcgccgtcttgagtcgggcgctgtactgggccctggcgctgtggtgaacagcccgacgaagcaccgaccgccggctgtcctcatcgccagggcgaggcatggggcgcggcatggtgcgcccggtagcagcatccatgagggtgatccggtcagccaaaatgccgagccggttttcccacttccggggccacggcaccagcaggtcacgctgacagcccacgccgtggcgtcggcagtccacaacattttctcacggccaggatgcgagtgcagcagctccaccggaacaccagcatcacgcacccgccgcatcgtgacctcatcctcacgtgccaccagcgggggagagcgactaccgctgcagccggtccaaagcgactcttcacagatgagggggtggatcggtagctgacccctaggtcctgatgtgggtcgaggtccttg

SEQ ID NO: 102 - DNA, 599 bp, Propionibacterium acnes; identical to SEQ ID NO: 100

SEQ ID NO: 103 - DNA, 17061 bp, Propionibacterium acnes
gtgttccagtgcctcgcgggcgtgatgttcttcttcggcaccttcttgccacatgcttcgcgcttcagcctcgccatccaagcgaacctggactgtgaacgagtcctcatcgggtccgtcctcattccacgcggcaatgatcccacgggcctcgtctgcgacctgactcaacttcatcgcctgcccgacagccccgagagccggaatctcgaacacccagatattcgcctcagccgagacctcacgatgggcgatcacttcgtaggtcgtctcaccttctactgtcgtgtccattacttccactccttcggaattttcacgcctgctcgctccagctgtgccaggacaccaactgacgtcagctggtgtcctgctggtatcgatacgcgcccggctccgccggggcgtccccagatttcatggcttcccttggcgttccgcagacgggcccatccttgagaacggagcagcttgaggacgtccttagttttctgcggtttcacacatcatagtatagccccacttaacttgtaaactaagcccctgtttacattttagttggtgcatgtgatccctgctcttatgacgtcgcccgacctggcgccttagacatgcactgttcatcctcaaccacactcaccgtcacgggtccgaaggcgaggtctatcaccattcgcatcgatgaagttgaagcaggatcgtccgcatcacgcactgccgatccggacagacgccaccggccgtaccgactgtttacgatctgccaccgcagactgctgccataaccgctatcacctctgatagtacgtttagtactatcagaggtgattcaagattctcctgtcgagcagccctacagtcacgaagtcctgcgatcgtcatcgcttaaggcagacggatggccatcggggaccactcgcaaagcaggggcgatcagcaacagtgatgtgccatgagcaagtactggtgcaccggctgtttactccgcccctagataaaccacgggtgcaggggtggacaccacaccatgaccgatgtggtgcccaccccatggctcacaggcaggccctatcgccgggagcactgctgcagatgaggctcagtaacctgccatgtctcacctggggccaaggtgccaagctccccacggaatctcaggcatcggaaaccagcagccgaacttccacagcatgagcgccctacgaaaaagcaggccgccgacggttctcaagaactcgccggcggcctgcatcgccactcgaactgtaaccgtggtccgaccccgtgcacaggtaagctccacactcccaccaggcatggccgaggcagtaccaagttgccgtggcccatcggcagatttggttaaattttgaaaagtcatatagactccttctgtaaatttttaaatctcataggactctcgccatcgccagccagcttcgacaggagtcccgatgtttcaccgagtgaaatatcggcaccgtttgagttgacctaaagctcaaaagatgctagaatccatcttacctcgttaggggcgttttgtcaaacgcccctatattgcgtgtcttcgcgcgtcgtagcgctgatgctgcgcctgtgtcgactatccgtttgtaagtactttcgatgacaccagcagtggctactcatgactggtgcgtgcgggtctaaagcagcagggaaaggaatcgcagtagaagccgcttgattcctatcacccctgatggtactatcagtactaacagagcagggcttactcgatgcgtgagaatcggggacatgctgagcctctcgtaggtcattggcctgctgggcgtcagtgtggcgcggttcgatccagtgaactctatcagctctgttagtactgtcagagttgatatattcgaccccaggaggagcccatgagttacatcgttcgcaccggaaatttggtcgacacccccgagctgcgtgagggagagcatggcccgtacacctacgctcgcgtcatcgtgtccgatcgcattcgccaggaggacggcagctacgtcaacgggccagcgatcgcctacgacgtcttggcgggtggcagccaagccgtgaatctggttgaagccgccaaggcgagcggcaacatccgcatcatgttcgcgggccgttaccgcgtcaccgagtggcggggtgagcagggcactcgtatccagcatgaggtccgagccgacgaagtgagcgtgagcctgctcggtcagagggtgaccgtggagcggcctcgaggtgacgtggcatccaaggagagcacgtcgttctgattgagtccgggggcacggtggtcgccgtggtaaaccgtgcccctgacagtactattgacactattggaggtatcagtgtgactgctcaaattttcgccttgtgcaaccagaagggtggcgtcggaaagtcgacatcgacgtttcatctggcccgtgccgcggtgttgcgtggccagcgtgtgcttgtcgtcgacaacgacccccagggcaacctgacgtctgtcgcggccgccgagcccgtgggggaggatcaggcggggctggccgatgtgctcagcgcgcgtgctccagagaccctccgcgatgtgatcgtgccgggaatctggtctggcctcgatgtcgtgccgacgtctggcatcacgctcggctgggtgcgtgacgaactcgtgatcgccggtgccggccgagaaggccggctgcgggaggccctggccggcgtcgaggacgactacgacgtgatcctgatcgactgtgctccatcgctcgatcagctcacgatcaacggcctggtggccgcccagggtgtcatcgtcgtgacgcactcgaagttgtggagcgccaacggcctcgcccagctgctcgacaccatcgacagcgtgcgcagctactacaacggcgcgctgcgcgtggcgggcatcatcgtcaaccagcacgaggagaacaccatcagcgggaaaacctggctcgacgagctgcatcaggctgccgagtcccggaagctgaccgtgcttgacccgccgatccccaagcgtgtcgtcatcgccgataccgtcgaggccgcgcgcggtctcgacgagtggggaagtgccgaggcggccgcgctcggccagttgtacgcccaccacctgacctgcatcgaaggagccctgtgatgacccgtccagccccccgaaagtcctcattgagcggatcaactccggtcgccccgccggctcagacggcgccggcaccgtctgccgcacctaccccccacaaggccgatgagtcacagacgagcagcaccacgaggaagtggcggcacaaggtgtcgttctaccaggacccggccgacaccgaccgggtgcgcggggcgatcctttacacgatgacgaccgagggcaaccggaacctgagccagttcgtcaacgatgccgtcatggccaaggtggtcgagctggaagtcaagtacaacgatggccagccattccccgctgtgggagcccgaggactaccccagggcggtgcagccgccgccggtgagtagaggaccatcgaccgtcgggggcttcaccatgcccccgaccctcggtcatcctgatcctcttgtcgatggtggtgacagtgggggattcacgcctcgttcagatcagaggaagtctcaccgcgtgattagtactatcaaatctgacagtactaacagagcagatagggttccctaggtcgagctgtatcacgccgacaaccagtgagccagtgatctacgaggggcgcaatatgcacccgatcggtagccgcgaaggcctcgccctgccccgatagtactatcaccactatcaatggtgctagtggtgagtttcttccattgatgacaacagcacagtgctgccgtctgtgtgcgggccaccagcccgcacacagttgccgtcgaggacgttgttcatgctctgtggtggccggtcctgagggcggctcgcaggatctcccggcgctcacggcgacgagcctggtagccaaggtctgcatgttcggcggcgagacgggctttgagggttgcggcttctgcacggcggtggagttggtcgtcgatgagttgggcgcgggccagacgccgcttatgggggttgtcgtgggtgaggggggcgtcgaggctgccgtcgtgggttagggccagggctgctcgttcggcgtcgtcgaggccgatgtggtggacggtcacgggtgcggtggtgacgtcgaggatgtccaggtggatgttgtggccgccgccgggggcttcggggaagtctggtgggctggcctggccggtgtcggggtcataccaggacaggccgatgatctcggcccagggtgggggcgggcagacggctcgcagaagggtgtgggccaggaacgtgttgcgggccatgatgcctccaagggtgaaaagcagtcgagtagcgatgacggcggggtagccgtctgctgggctgaggccgaccgggcccatgtcctcgatgctcttgtgctgcggccataccccaaagctaccaaacagtctttttaatctcaaagatacaaacagtgcttgacatattatctgcagcgaaagatactttcatcatggtggctgatcatgattacgcgactcctgacgatgagtggatgacacctcctcaggtggcccgtgtgattccgaacaccactgctcaggctgtccggcgctgggctgaggagggtcagcttcctggggcgtttcgtactccttctgggcgttggcatattccgtggtcggctgtggtgggcatcatggggtttgatccgcgtgagtccgcatcaccgagtgatcgtcaccagagctgacagagtcgtcgatgagctttcgagtgcagagctgatggcacgacggtctggatacttgtggagatgagagacgaccacatccagtcatggtcggggtacaccgaggggcagattcagcagtgctggcacgatgaggttgcccctgccattgactcgctcatggagcaggtaaggtctgttgccgagactcctgtgccgccgggttcgagattttacggcgatgagcagtgggccaagccttttcatccgtctactgcgatctgcggttcaatgggtccgccagcgatcacttgcacgcgctgaagctcctcgtctgggaagcgaacgtccaccatgtctatgcgccgtacacccttgctcgtgcatctattgaggcatcgtctactgctgtgtggctgttgagcacgaagacgcgcggagaacgtgtgctgcgagccttgcgatggtacgcgcaggattgtcacgactcgtgcaggttcatggatgatgagcagtatcgtgaccacctattgcggcgcattgaggggactgtcgctgcgggaaatctcgactcgcgcgctgctaggaaacggtaccgtgcaaccgatgttgtcgatgaggctgatcagctggttcccggaactctgagggcgtggcgagctttttctggtatggcccattcccgtatgtgggcatccagggggctgctcgacatggaagtgctgtccagtggccaaggaatggttacggcgaaggtgacgagcggatcggcccaaatcctttgggccgtcgtggcagctctgaatgttgctctcagtgccgctcgcttgtggcgtgattcgatgtgctcaccgtttgctgttgcccagtcggtagacgcgatgccagaggcgtttcgccgccctgtttagggtctgatcggggtagtgggtgttcacggggtcccaggttggccatggggcggcttggtgatgtgagttgggttgtgtggcagcctgggtgttgggtgtggcttcgttggccacgaaggcatgctcttccttgtgctgggacttgagtccccagtgctctcccctttgctagtggggggtggggtccccggaggtaggtcctccggggactttttctatgtctgtccgtgccccaggatttcgtatctaggcagtaccaattttgggttagttggaggtttctttggtaatggacagggtgagggtgatgaagaggtggccgtccttggtggcagaaattttctcgaacttcagctgaatgttgttatcagccactatctgttgggcggtgaggtgctcggagagcttctggaatccttcgcggatccacaggttgtaggggttggtgaccgagaccgaagggtatgggtcgaccttcagcgtcaggactggctggtctgggttgagggagttgatcttcaccagtttggggtaccggtcgcactcatgtgtctcttgtgttgggggccagcagtcgggggcccattcctcccagtggtcacgcatctcacgaagtactttcctgcatctcagcctctgcaggagctcgcgcgccaccgatgggagggctgccatgatgagggcaaggactgcgaacccgatgatgtaattgaccgtgtccctcgtcacgccgttcttgccgaggattccgatggcgaacgcgatgacgacaccgcccaggcacaggtgcatggggtcatgctgtgatggtttttcttcttcagcgactggtggggctatagtcatgtgtgccccttagtactaagtgatactggtgggttgcttttccccggtggccgtgtgcaagacggccaccggggttttccttcatgttcctgattttatctgcccggtgtggcgttttcatctttgtgtgggtggttcgcctggggtcttggagtgtggtgacgcggtgatggtcacggtgacggtgactgtggcgcgtggcgggtgaggtggttctttcctggtctggtgtgtggcccaggtgagtgtggtgatgagggccagggtgaggatgatgaccagggtggggagtagtttgtctggccggtgtcgccgggcttggtggcgcggcatgtttttccagggtgtgtctccgaacaggtcgtcgtcggaggggtcgtcgtggttcatagggtggccttggcgatggtggtgggcgagtttggtccaggtgatggtgccgtcggaggcgatgtggcggtcggcgggcagggtgtggacggtccatccggcgtcggtgagggcggtggtgaaggatttcttgatggatcgtttgggtaggtcgatgggggcgtgggtgccgacccagatgcaccggtttttgaggtgggtggcgccgaggtggttcatgtcgcggaccatgttttgggtgagtgtgagggtgtcggggtcccattggacggggatgatgatgtggtctgcgatggtgatggcgtgttgccaggcggcgtcgaggtcgttgtttccggtgtcgaggatgatgacgtggaagcggcttcttagggcggtgatgatgcggtcgaggtcgtcggcggtggggggtgtgatgaggctgttgtggttgtcggtgatggtgggtaggcatgtgatggtggcccagccttctggttgccaggagatgtaggggccgaggtcgcggggttgggaggcgaatcctgggtgacgggctgcgcgggcgaggtcgatgacggtgttgtcggtgtggcggggtgcgcgggtggagagggtgccgcgtgggttgatttccacgacgacgatgtcgtcgtgtcctgctgtggtggcgagggcttgggcaaggatgacggccagcggggttttgccggtgccgcctttgaggttggcgagggtgatgatgtggtcggtgagttgggcgggtgcggcggtgtggtgagggttggcggtgaggttggcgatggtgaacagggcatcgagatcgtcggtggtgttctgctcggtgggttgggggtcgccggagatgatcgggtcggcgcggcgcggctgccatgccggcctcaccactgtcacgaccaccacgggtctgctggcgctgtgtgggtgtcgtcggcgatgactcacgatcggcagtctcaccatcgtctcggtgatgctcggctagcgctggacccggtcaagttcgggccggctcacccagtggtgatgactcggtcacagaaccgctgccggtcgttatctcggacgtctcgactcctccagtcctgatgggcgttggagccacctacacctactctcagaacgaccccgacctcgtgtggggcgggggcagatgtcacttgggccaatcgagagcccaggtgatggggaaagcaggggtgtgatatctgtcctggaaaactgggcagctgctaccgtggattgacggatctccacgaaagaagggaatgcgaccatgcagatcaccgtcaagaccatcaaagatcatcgggttcgcactgtccagaccgccatgagcagcgccttggggattggttcccaggtagacatgctcgcccccggcggttccaccagctcgagttccggttcatgctgctcgtgctcgacctgcgcggtagtggcgcagcctcaagactgaacggctggtcagccccaggggcgtggcgctcatcgcgtcacgccccttctattcgctggacagggtgcgcgagctgaggaacatcgcggtgtgtgcgatgacgaggggcaggagcaagtctgtgcgggttgccaagtagccctgcgcgatggccatcacgctggccccgacggcggcgaagacacctccgatacgtcgcttcatgccgccgaattgcatcaggacgaataggactcccgcggtccacatccctccgggcatgcatctgggaaagatgaaccggaagatgatctcttcacaggagagctggagtactagcagcgtagcccccacggggagactcacctctactgacagacggatcgtcttcatccacccacccgagctggcatcgaccatttcggtggccatgcgcgaccggtggcctcgtgcctctcgctgcgtgtcgatccagccgagcagtccgtggacgctctccgctaggactcctgacgcgacagtctcaccaattcctaagcccacggcgaggaccgcgacgcccccctgcacggcaggctgtgtgacttggtggtcccaccaacccgccggcaggaccatgcgtgcgaggctgcacacgagcaggaggtggagggtcacgacgagcgacatctggaataccgcttgccgttcggcgatggtggcgttgggaaagagcggtaggccggcacgggcagcggcgctcgacagcttccgcaagagcggtttggagacgaagtagtaggcgacgtacagcgccagcgctgtcgcgatgatgatcatcggtctgccaccgagctgacccgccgatagccgtttctgttccaccaatactggctgttgtagatcaggtggcccagaacacaggcccagatcccccagaagatgaacaggatagtccccaaggcggcgagcgggatcttggagaggacctgtccccgtccgaacaccgagtggccgcaagcaaacaagagtgctcccacagcggtgagcgcgagccaggccggggttgctcgcagactgatcaccgggaccccgacccggaagccgacctcttctcctacagcgatgactagcaactgccacagcggcatgttctgaacggagcgcgcgactcgggctcgagtcacccacacgggctgttgagcgctcacatcaccactcaggtaccccggtgaggcacttcgcttagtactggggcccgatgtgcgagcattcgtgatgtgtcgcaggatccggttgtcaagccaagaggccagcagggctccggcgacagtgacgggtagcccgatcagcacgaggccccagccatgcggtgccgagaggtttctggccggcgtgcacgcgaggcaggcaaatgccatcactgccagcactacgacgtagatggtcgcataattcgacttgcgggtgacgttgccgaccatcttggccaaagtcgctggggaccagctgatgagtgcgatggtggtcagcaggaagcaggaccagacagacatccggcgcactcaggggtatgggtgcggctgtgggttttggaaaccgccatatgcggcgtagcgggggtgtgcccgcatgggtgcgctgggcagtgacagggcgagcagcccaggcgcccagagcctgacacagtgcagtcccagcccctggatctctatggtggtgaaatcttcgatgtacaggggtgacacacaggtgatgctgttgaccacgctctttaccagttccgcccccgtgtgggtgtcgtcaggtggcaggtcttcggcttgggcaatggtgcccgcgtcgaatttcgccacaactgattgcgcggcctgatagttcctcgcgtagtaggagacgttcgagtcgaggtcaagcatgtcctccgtggacatactggacgcgtcggcctcggcgtcgaaagacgtccataccgcgagcatccgaaccccgctgcactcgagaaacgccttgtacatggctgcttccagacccgcgtctgcacctaggccgacggcgacgaggggaagttggttgccactaccgaccatcatgcatgccacggtgaaatgcttgagcccgggagtcggaagccagtagaaacgcagttcgtggcttcggcccgctgcacgttccacgagccgctggatgcgctggaggcggggtccttcgacgcggatgcgcacaggtgacgaggctccataccacaggcccatcgcggcatctacctggatcaattcataagccgcggacagcgttgcggcgacgcgtgaagtgtggacggcggtgccggtcgtcacggccgttcccagccacggctcaccgtcgtgccgacgggggttgtaacccaggtaaaagaactgcgccgggatccactcctgccgggaggtcccgacacggggagtcttgacccatgtcatgggcaagtcgtcgcgataggtgtcgaacgcacctccagccactcgttgcgcgaagccgaatgcgcccagatcgagaacttcgtcctcggtccgggcgaggagttcctgacgagtcgcccagcgccgttcgaagggactatggagaatcccggtacccgcgcagtagcgctcgacggcctccgcgtagaccttgatctctgcctcaaactcgttcagccccaccccaccgatgtggtagctacccggcttggggtcgggccggtcaagcagtgcgtgcatccccgtgagttccccaccgttcacccgcacgcgggggccgagcgcggggtgcagcgagtagccgacggaagtcaccagcccgcatagcgggctgtaggtgcgccgcctgagccgggctgcggtctcgacggggtcgctatcctggcgaagcttcatcgctcgccccctgccgccagccactcacggatgtcgtagtacaggtccggagcggtttcaacctgcgctggtgcatcaaaacgggacataggtaggacgtcgttgtaggcgatctccatcgtcggtatgtagaccgacaacactttgttgcgcgtcgtgttgaggccgttgcgggcgatgctgacagcctcatgcgcgacgtgcgcggccaagatcgcgcgcaccgacgctgccacggccggcgctccggcccttacgcggtcggcagcggccacccgcatccaggacaggtagctctgccgttcgcgcaggttcatcgcgacccgctgctcgaaggtccggtaggacgaggtcgcaccagggacgacgtagggacccacgtacaaggccggcccgtctacagctgcgtggagccacgacaggtgggcgcgtcgggcgaacaggtcaagggcgcgcagcatagccgggttgttctgcgccagcgctaccacaaggagtggctgcaggtccggcgccgaacccagcaacgccaacatctgggaggcctcctgctccatgtgcaactcgtcggccgactgctcaagccgcaggcctgcgaagagggtggctgatggctgcgtgtcgtcagcgaggacggtagcctgcagcccctctccctcgagaatctgctggatatcgccggcgaggagcgcgtcgtcgctgaatacccacaccgggcgcgtctctctacctccatccatcttgtcctcaacgttttcgaccagcgcaccgatcgatgctaggtgggccatcacgtcgtcaagggccgcgcgggtcaatccgggcacccgggacacgatctcgggcggctgcagtccttggctcaacaagtccaaggccggccacagggtcccggtggcgtcgtcgtcctccagcgttgtgctctcggcgttccagacgcctcgacggaactccaccctgtccatcgagtaaggcaccatcatgaggcccggtgaaatgtggttggtcactttggctcctgtacagcctaggcttggacgcccacggtcatggtgtgggtcgcggtttggaaaatcccgtcgaggttgagtgcctgattgagttcgtcctcgtagaagcttgaggactcgactgaggcaagaccgagccccgtgcagaccaagttgatctgttgtgcgatcgccccgacttcttgaagggcgaacctcaaacccctggctccgtacttccgcatcgccctccacggcgagatgacgaacaccaagtgcactccggccgcatccgattgctccacggccggctcgccggccatcgaattcctcacgccgcgacagccctcttcaccggtcacgggcaccagtcgatcgatgaccggcgagtagcggtagacgccgcgactcaagccggacacccgttgtgcggacatgaagatagacacgggatacagccctccaccagacgggacagcgcgtacattataccgcacgatatcaccgctcgaacgtgggacatccacgtgccccgtcacaccggcagcacctctcagaaacgcagctacgtcacgcaggtctagggattcgccggtgtagttccgtccgctgcgccggcgggcgatcacttgctcgaggggtgcgcgcaccctgctggacctgggaagttcgatcacatcggcagcgaacgtgtcgcgatccatctgtccgtacgtaacgatcatggggtcaacgaaatagtcgccgaccgagacgttgaactccatatccccccgggcgatgcgcgaggcgagcaagaagtctgcagctgcgttagacagccccggcccatcagtgttgtcgcagcggaactcgtgggtccgaaaccccacaccttccgtgcccgggctctgcgctcgatacgacgtgatcgcagaactagccttccttaaaccgcccggagtagctaccatgaccgtcccctctgaggtctcccgaacacttgcgacaatagcagcatgtgggggcagccgccagaggcgggcatccttgtctcgacaaccattgacctccggattcgatatgtgcataatcatagtcgtgccaacacgaaacgtgtacgtctcggaagacgacctagacctgttcgccgaagccaccgagatcgctggaggcctgtccgcagcggtgttggaggccttgcgcagctacgtagacaggcaccatcgcgcggccggcggattcgacgagatcgagctggagctgcagaacgacggtatcgaccaccgtgtcaccttcatgggtcgccgcctgatacacatccgccgtccagatcccgagggaacccgcatagacactgtctacttgaccgccaaacaccaattcgccgttgccaccaaaatccaacgacggctgccagactggacggccggccacgagcacatctggtccgacccggagacctggaatcgggagttctggatcgcaggtgacaagacgatggccgtgtatcccagccttgacaaactccgcgaagctgaccccaatgtggccgaacgcgccgaggccgcggtcaaaatcccgccgttcgaggtcctggacatctgatgacagaatcatcatcttcccggcggcaattggcaatgccggtgctgtcagtcacggatctagccaagaaatacgtggttcatggcggctacgaggtcccggcactcaacggtgtctcgtttgacctgcacccgggagagatgctgggtttgttcgggccaaacggtgctggaaagacgacgctggtcaggatcatcgcgggcctcttatcggcagattctggagacgtccactggggatcggatcaaggtcgggccaggttaggctacgtgtcccaaaagggtggactgcagtacgggctcacgtgccgggaagagatggtcttccacgcacaatgcttcggccagtccgccaagcaggcccggactagcgtcgacgaggtcgccgcgatgctgcactgcgattacctgatggagtgggacgtcggaaggctctccggtgggcaacgccgaatcatcgaggtagggctagcactcgtcaatcaaccatcggtcgtcctgctcgacgagcccaccctgggcctggaccccgcaacacgcctgtcgttgtggcaaacggtaaagtcggcacgccgtgagaccggtgctgccttcctcgtcaccacccactacattgacgaggtggccgagcacctgtccaacgtcagcgtgatcaaccacggaaccgtcgtcgccaacggctcgccagcgcacatccgagaaatgttcgcgaccggggaagtaacgctcggcgtggccgaggatacggtggacagtgcggtggacgtgttggctgggaccgcgttcgaggcgcaccccaccgaaaccgtcccggggatcgtggtcaggtccaggcatcccgacgtggacgcggccaagatcatcaccatcctggctggtcatggcatctcggtggactccatatccgtacgcgaggcgaccttggaagaggcgtttctcacgatcacaggcagtcgagacccggagaggcaaatcccatgaacacttgcttcaggcgatatgcggcgatgtcgctgagagcgcggcgtgatttggccctgacattcatccagcccctcgtctacctagccctcttcggaccgctcttcgtcacgacgatgaagatgtcgcagagagctaccgccgctacgggttactccctatacatcacgggcctgtccatccaaatggccatgacgatcggtgccttcgcggggctaaccatcatcctcgaataccgactcggcatcctcgaacggatctggagcacccccctcacggggagcaagatgatggcggggcgaatcgcgcgcgacgtcgttatgatgatgatgccgatactggtcgtcttcatcatcggcctggtgctgggaacacgccccagcccactgggcctggcgacctacttcgtgacagtgctcggcacaggagccacgttcgccggggtctcctacgcggtggcactcagaacgaagagcgaggcagcgctatccgcgatcttcaacctcatcctgctacccatcctcctgctgtcggggatcatgctgcccatgtcgttcgcaccacactggatcgccaccgctgcccacgtgaacccgttgtggtacctggtgcaaggcgcgcggaaccagttcagcgttctagggctcgtggcggcggccccatggagttgggctgtggccatcgtcatgtcagccgctgccttcggctgggcaagccacgaattcaacaagaggcgctgacacaaagaatggtgccgggaacccaggtccccggcaccaccgagtgcactcgcgacgtcaacgcaccgttgcggtcactgcgcaggtcgagcacgaggacgacgagcccgcgctgctgcaggtcgagccgccaggcgcgagcaggtcgacgttagcgtcggcgccgccgaagacggacgtgacggccggctgagaggtgcggatgcggtgctccagcgaggaggtggtggtgagtttcatgggaggtgctcctaggagtgagacgagaacaaaccctagcgataggttagcagtccgcaaccgactccgggaatagtagaagcgcgcatccgtagcggaagaccttagcctgattacagtgaccctgttcgcgtctcaacattattccacacccccgagcagcgaacgacaccgcgatgatgatccgtcgcctctccaccgaagaactccgcgcccacatcgcaccgggccgccgtcccgtgcatcagacctgccgtcaacgtcggccatgaagctgggaaggtggctctcgtctaggagcagacgcgggacgcctcctccaggttgggccggggaagtgtccggttcttgatgtaggtggcggtccctattgatgggcgttgaccgtgggaatgcggtcggcgaagggggtggcgaacccgttgagcgcaggcttccagcgcatgcatcaacgctgtctgccggccaccggcaagcctcacccgcccgtcatggccatcatcgaggtgccggtgaatcctcgacacatgatcccaactcccccggaggggcttccggggctgttcagccaccagatcagccaggcggcgagcccgactctgccacccggaccctgcagagcgtgcctgctgccgtcgtgtcgtgtcgggccagtgggccaccagatcggccacatccgtcttggcccatctccagcccgccagacccagggaggccatcacctcatcgacgccgcgccgggtggtctcatcaaccccgtcaaacagctcgggccacctcgatgatgccgtccgtgaacgatccagattcatgacatgctcctcttcacagatgccgacgacgatcaggccgtggccgtggcaacggggtgacctgccggcgcggctcacgacgttgagccggaaccacacgagacgcaccagtgtgctgcgccgtcttgagtcgggcgctgtactgggccctggcgctgtggtgaacagcccgacgaagcaccgaccgccggctgtcctcatcgccagggcgaggcatggggcgcggcatggtgcgcccggtagcagcatccatgagggtgatccggtcagccaaaatgccgagccggttttcccacttccggggccacggcaccagcaggtcacgctgacagcccacgccgtggcgtcggcagtccacaacattttctcacggccaggatgcgagtgcagcagctccaccggaacaccagcatcacgcacccgccgcatcgtgacctcatcctcacg

SEQ ID NO: 104 - DNA, 1527 bp, Propionibacterium acnes
accagatcggccacatccgtcttggcccatctccagcccgccagacccagggaggccatcacctcatcgacgccgcgccgggtggtctcatcaaccccgtcaaacagctcgggccacctcgatgatgccgtccgtgaacgatccagattcatgacatgctcctcttcacagatgccgacgacgatcaggccgtggccgtggcaacggggtgacctgccggcgcggctcacgacgttgagccggaaccacacgagacgcaccagtgtgctgcgccgtcttgagtcgggcgctgtactgggccctggcgctgtggtgaacagcccgacgaagcaccgaccgccggctgtcctcatcgccagggcgaggcatggggcgcggcatggtgcgcccggtagcagcatccatgagggtgatccggtcagccaaaatgccgagccggttttcccacttccggggccacggcaccagcaggtcacgctgacagcccacgccgtggcgtcggcagtccacaacattttctcacggccaggatgcgagtgcagcagctccaccggaacaccagcatcacgcacccgccgcatcgtgacctcatcctcacgctgccgatcaccgtcaaccagatggtcagccacgatggtgttcacaccccatgactcatgcagttgcctggccaaggcgcccaacacctgctgacgcacctgtgacttgacgtcatcatcctccagatcctgtgtaccaaccatcacggaggccaacacatcactgcgttgctgaaccagggtgttgacgacgtcgacatcgtcgatacccatgggattgttggcgcgcgcggccacggcatgaaacgtgttggactgcaaattctcgaccagaccacgccgatagtcgttgaactgggaggtgtcggcaatgacaccggtcatgatgtaggccgacccctcggacaaggccctgtaggactcgtcgacgaacgccaccaaccccggccgccgccggtaaagtcgacctgcttcctcgtcagccagcaaccatgacagtttttgccccatatgtcctccttgctgacatgacctcgaacatggtaaactttccgtaggaaaaacggggcaagtactttcgagcggctacctcggcccccggtgggctgtccagccttgtgcggaccgaagccgggggattccttatgtttgcggcaatgatgccgctgcaccccctcatgccgtggtgtggtcctttccccgtgtgcggtgtggtgcgtcgttgactggtttgtggccccgagccttactctgaccggtaggagaacggtgtggggtctacggatagcccactcggctcccggtggaatgtccaacagggtagggttgatgagttggtccatcaggaccgtcccggtggctgcgtcaatgatcgatatttcgatgatgcgcccgtccaggtcggtggtttcggtgtcgaggatgactccgactccgggttctaggagttggggatccaatgggtggtcatcgtgtggctcctacaggg

SEQ ID NO: 105 - DNA, 17061 bp, Propionibacterium acnes; identical to SEQ ID NO: 103

SEQ ID NO: 106 - DNA, 2003 bp, Propionibacterium acnes
accagatcggccacatccgtcttggcccatctccagcccgccagacccagggaggccatcacctcatcgacgccgcgccgggtggtctcatcaaccccgtcaaacagctcgggccacctcgatgatgccgtccgtgaacgatccagattcatgacatgctcctcttcacagatgccgacgacgatcaggccgtggccgtggcaacggggtgacctgccggcgcggctcacgacgttgagccggaaccacacgagacgcaccagtgtgctgcgccgtcttgagtcgggcgctgtactgggccctggcgctgtggtgaacagcccgacgaagcaccgaccgccggctgtcctcatcgccagggcgaggcatggggcgcggcatggtgcgcccggtagcagcatccatgagggtgatccggtcagccaaaatgccgagccggttttcccacttccggggccacggcaccagcaggtcacgctgacagcccacgccgtggcgtcggcagtccacaacattttctcacggccaggatgcgagtgcagcagctccaccggaacaccagcatcacgcacccgccgcatcgtgacctcatcctcacgctgccgatcaccgtcaaccagatggtcagccacgatggtgttcacaccccatgactcatgcagttgcctggccaaggcgcccaacacctgctgacgcacctgtgacttgacgtcatcatcctccagatcctgtgtaccaaccatcacggaggccaacacatcactgcgttgctgaaccagggtgttgacgacgtcgacatcgtcgatacccatgggattgttggcgcgcgcggccacggcatgaaacgtgttggactgcaaattctcgaccagaccacgccgatagtcgttgaactgggaggtgtcggcaatgacaccggtcatgatgtaggccgacccctcggacaaggccctgtaggactcgtcgacgaacgccaccaaccccggccgccgccggtaaagtcgacctgcttcctcgtcagccagcaaccatgacagtttttgccccatatgtcctccttgctgacatgacctcgaacatggtaaactttccgtaggaaaaacggggcaagtactttcgagcggctacctcggcccccggtgggctgtccagccttgtgcggaccgaagccgggggattccttatgtttgcggcaatgatgccgctgcaccccctcatgccgtggtgtggtcctttccccgtgtgcggtgtggtgcgtcgttgactggtttgtggccccgagccttactctgaccggtaggagaacggtgtggggtctacggatagcccactcggctcccggtggaatgtccaacagggtagggttgatgagttggtccatcaggaccgtcccggtggctgcgtcaatgatcgatatttcgatgatgcgcccgtccaggtcggtggtttcggtgtcgaggatgactccgactccgggttctaggagttggggatccaatgggtggtcatcgtgtggctcctacagggagtgtctgggctggacagcggtgcaatacccgcgccatagcggttttttctgcgggggtgacccacagctggtatttcgttttgacggcgatttggcgggccacgtagtcgcatctgtaggccttgttagggggtagccaggtcgctgcatccctgtctcgtttggcctcattagcgggtccgtcgacagccagcaagttcaacgggtcgttggccagggcggtgcgttgcagcggtgagagtttttgcgcgccggtaatccacgcgttcccgagggctacgacgtggtcgatttggactgttgtcgaggtgtgccggccgcgccgccaggcgagtgtggacccggtgtaggggtcgtggagtcgcccggagacgaccacgcatcgtgatccgggtttcaggtgggcctcgaccaggtcgcgggcaagggcatcgttgcgggtgtcgcatccgttgtggccccaggggcgggtcaa

SEQ ID NO: 107 - DNA, 17045 bp, Propionibacterium acnes
gtgttccagtgcctcgcgggcgtgatgttcttcttcggcaccttcttgccacatgcttcgcgcttcagcctcgccatccaagcgaacctggactgtgaacgagtcctcatcgggtccgtcctcattccacgcggcaatgatcccacgggcctcgtctgcgacctgactcaacttcatcgcctgcccgacagccccgagagccggaatctcgaacacccagatattcgcctcagccgagacctcacgatgggcgatcacttcgtaggtcgtctcaccttctactgtcgtgtccattacttccactccttcggaattttcacgcctgctcgctccagctgtgccaggacaccaactgacgtcagctggtgtcctgctggtatcgatacgcgcccggctccgccggggcgtccccagatttcatggcttcccttggcgttccgcagacgggcccatccttgagaacggagcagcttgaggacgtccttagttttctgcggtttcacacatcatagtatagccccacttaacttgtaaactaagcccctgtttacattttagttggtgcatgtgatccctgctcttatgacgtcgcccgacctggcgccttagacatgcactgttcatcctcaaccacactcaccgtcacgggtccgaaggcgaggtctatcaccattcgcatcgatgaagttgaagcaggatcgtccgcatcacgcactgccgatccggacagacgccaccggccgtaccgactgtttacgatctgccaccgcagactgctgccataaccgctatcacctctgatagtacttttagtactatcagaggtgattcaagattctcctgtcgagcagccctacagtcacgaagtcctgcgatcgtcatcgcttaaggcagacggatggccatcggggaccactcgcaaagcaggggcgatcagcaacagtgatgtgccatgagcaagtactggtgcaccggctgtttactccgcccctagataaaccacgggtgcaggggtggacaccacaccatgaccgatgtggtgcccaccccatggctcacaggcaggccctatcgccgggagcactgctgcagatgaggctcagtaacctgccatgtctcacctggggccaaggtgccaagctccccacggaatctcaggcatcggaaaccagcagccgaacttccacagcatgagcgccctacgaaaaagcaggccgccgacggttctcaagaactcgccggcggcctgcatcgccactcgaactgtaaccgtggtccgaccccgtgcacaggtaagctccacactcccaccaggcatggccgaggcagtaccaagttgccgtggcccatcggcagatttggttaaattttgaaaagtcatatagactccttctgtaaatttttaaatctcataggactctcgccatcgccagccagcttcgacaggagtcccgatgtttcaccgagtgaaatatcggcaccgtttgagttgacctaaagctcaaaagatgctagaatccatcttacctcgttaggggcgttttgtcaaacgcccctatattgcgtgtcttcgcgcgtcgtagcgctgatgctgcgcctgtgtcgactatccgtttgtaagtacttcgatgacaccagcagtggctactcatgactggtgcgtgcgggtctaaagcagcagggaaaggaatcgcagtagaagccgcttgattcctatcacccctgatggtactatcagtactaacagagcagggcttactcgatgcgtgagaatcggggacatgctgagcctctcgtaggtcattggcctgctgggcgtcagtgtggcgcggttcgatccagtgaactctatcagctctgttagtactgtcagagttgatatattcgaccccaggaggagcccatgagttacatcgttcgcaccggaaatttggtcgacacccccgagctgcgtgagggagagcatggcccgtacacctacgctcgcgtcatcgtgtccgatcgcattcgccaggaggacggcagctacgtcaacgggccagcgatcgcctacgacgtcttggcgggtggcagccaagccgtgaatctggttgaagccgccaaggcgagcggcaacatccgcatcatgttcgcgggccgttaccgcgtcaccgagtggcggggtgagcagggcactcgtatccagcatgaggtccgagccgacgaagtgagcgtgagcctgctcggtcagagggtgaccgtggagcggcctcgaggtgacgtggcatccaaggagagcacgtcgttctgattgagtccgggggcacggtggtcgccgtggtaaaccgtgcccctgacagtactattgacactattggaggtatcagtgtgactgctcaaattttcgccttgtgcaaccagaagggtggcgtcggaaagtcgacatcgacgtttcatctggcccgtgccgcggtgttgcgtggccagcgtgtgcttgtcgtcgacaacgacccccagggcaacctgacgtctgtcgcggccgccgagcccgtgggggaggatcaggcggggctggccgatgtgctcagcgcgcgtgctccagagaccctccgcgatgtgatcgtgccgggaatctggtctggcctcgatgtcgtgccgacgtctggcatcacgctcggctgggtgcgtgacgaactcgtgatcgccggtgccggccgagaaggccggctgcgggaggccctggccggcgtcgaggacgactacgacgtgatcctgatcgactgtgctccatcgctcgatcagctcacgatcaacggcctggtggccgcccagggtgtcatcgtcgtgacgcactcgaagttgtggagcgccaacggcctcgcccagctgctcgacaccatcgacagcgtgcgcagctactacaacggcgcgctgcgcgtggcgggcatcatcgtcaaccagcacgaggagaacaccatcagcgggaaaacctggctcgacgagctgcatcaggctgccgagtcccggaagctgaccgtgcttgacccgccgatccccaagcgtgtcgtcatcgccgataccgtcgaggccgcgcgcggtctcgacgagtggggaagtgccgaggcggccgcgctcggccagttgtacgcccaccacctgacctgcatcgaaggagccctgtgatgacccgtccagccccccgaaagtcctcattgagcggatcaactccggtcgccccgccggctcagacggcgccggcaccgtctgccgcacctaccccccacaaggccgatgagtcacagacgagcagcaccacgaggaagtggcggcacaaggtgtcgttctaccaggacccggccgacaccgaccgggtgcgcggggcgatcctttacacgatgacgaccgagggcaaccggaacctgagccagttcgtcaacgatgccgtcatggccaaggtggtcgagctggaagtcaagtacaacgatggccagccattccccgctgtgggagcccgaggactaccccagggcggtgcagccgccgccggtgagtagaggaccatcgaccgtcgggggcttcaccatgcccccgaccctcggtcatcctgatcctcttgtcgatggtggtgacagtgggggattcacgcctcgttcagatcagaggaagtctcaccgcgtgattagtactatcaaatctgacagtactaacagagcagatagggttccctaggtcgagctgtatcacgccgacaaccagtgagccagtgatctacgggggggcgcaatatgcacccgatcggtagccgcgaaggcctcgccctgccccgatagtactatcaccactatcaatggtgctagtggtgagtttcttccattgatgacaacagcacagtgctgccgtctgtgtgcgggccaccagcccgcacacagttgccgtcgaggacgttgttcatgctctgtggtggccggtcctgagggcggctcgcaggatctcccggcgctcacggcgacgagcctggtagccaaggtctgcatgttcggcggcgagacgggctttgagggttgcggcttctgcacggcggtggagttggtcgtcgatgagttgggcgcgggccagacgccgcttatgggggttgtcgtgggtgagggggggcgtcgaggctgccgtcgtgggttagggccagggctgctcgttcggcgtcgtcgaggccgatgtggtggacggtcacgggtgcggtggtgacgtcgaggatgtccaggtggatgttgtggccgccgccgggggcttcggggaagtctggtgggctggcctggccggtgtcggggtcataccaggacaggccgatgatctcggcccagggtgggggcgggcagacggctcgcagaagggtgtgggccaggaacgtgttgcgggccatgatgcctccaagggtgaaaagcagtcgagtagcgatgacggcggggtagccgtctgctgggctgaggccgaccgggcccatgtcctcgatgctcttgtgctgcggccataccccaaagctaccaaacagtctttttaatctcaaagatacaaacagtgcttgacatattatctgcagcgaaagatactttcatcatggtggctgatcatgattacgcgactcctgacgatgagtggatgacacctcctcaggtggcccgtgtgattccgaacaccactgctcaggctgtccggcgctgggctgaggagggtcagcttcctggggcgtttcgtactccttctgggcgttggcatattccgtggtcggctgtggtgggcatcatggggtttgatccgcgtgagtccgcatcaccgagtgatcgtcaccagagctgacagagtcgtcgatgagctttcgagtgcagagctgatggcacgacggtctggatacttgtggagatgagagacgactacatccagtcatggtcggggtacaccgaggggcagattcagcagtgctggcacgatgaggttgcccctgccattgactcgctcatggagcaggtaaggtctgttgccgagactcctgtgccgccgggttcgagattttacggcgatgagcagtgggccaagccttttcatccgtctactgcgatctgcggttcaatgggtccgccagcgatcacttgcacgcgctgaagctcctcgtctgggaagcgaacgtccaccatgtctatgcgccgtacacccttgctcgtgcatctattgaggcatcgtctactgctgtgtggctgttgagcacgaagacgcgcggagaacgtgtgctgcgagccttgcgatggtacgcgcaggattgtcacgactcgtgcaggttcatggatgatgagcagtatcgtgaccacctattgcggcgcattgaggggactgtcgctgcgggaaatctcgactcgcgcgctgctaggaaacggtaccgtgcaaccgatgttgtcgatgaggctgatcagctggttcccggaactctgagggcgtggcgagctttttctggtatggcccattcccgtatgtgggcatccagggggctgctcgacatggaagtgctgtccagtggccaaggaatggttacggcgaaggtgacgagcggatcggcccaaatcctttgggccgtcgtggcagctctgaatgttgctctcagtgccgctcgcttgtggcgtgattcgatgtgctcaccgtttgctgttgcccagtcggtagacgcgatgccagaggcgtttcgccgccctgtttagggtctgatcggggtagtgggtgttcacggggtcccaggttggccatggggcggcttggtgatgtgagttgggttgtgtggcagcctgggtgttgggtgtggcttcgttggccacgaaggcatgctcttccttgtgctgggacttgagtccccagtgctctcccctttgctagtggggggtggggtccccggaggtaggtcctccggggactttttctatgtctgtccgtgccccaggatttcgtatctaggcagtaccaattttgggttagttggaggtttctttggtaatggacagggtgagggtgatgaagaggtggccgtccttggtggcagaaattttctcgaacttcagctgaatgttgttatcagccactatctgttgggcggtgaggtgctcggagagcttctggaatccttcgcggatccacaggttgtaggggttggtgaccgagaccgaagggtatgggtcgaccttcagcgtcaggactggctggtctgggttgagggagttgatcttcaccagtttggggtaccggtcgcactcatgtgtctcttgtgttgggggccagcagtcgggggcccattcctcccagtggtcacgcatctcacgaagtactttcctgcatctcagcctctgcaggagctcgcgcgccaccgatgggagggctgccatgatgagggcaaggactgcgaacccgatgatgtaattgaccgtgtccctcgtcacgccgttcttgccgaggattccgatggcgaacgcgatgacgacaccgcccaggcacaggtgcatggggtcatgctgtgatggtttttcttcttcagcgactggtggggctatagtcatgtgtgccccttagtactaagtgatactggtgggttgcttttccccggtggccgtgtgcaagacggccaccggggttttccttcatgttcctgattttatctgcccggtgtggcgttttcatctttgtgtgggtggttcgcctggggtcttggagtgtggtgacgcggtgatggtcacggtgacggtgactgtggcgcgtggcgggtgaggtggttctttcctggtctggtgtgtggcccaggtgagtgtggtgatgagggccagggtgaggatgatgaccagggtggggagtagtttgtctggccggtgtcgccgggcttggtggcgcggcatgtttttccagggtgtgtctccgaacaggtcgtcgtcggaggggtcgtcgtggttcatagggtggccttggcgatggtggtgggcgagtttggtccaggtgatggtgccgtcggaggcgatgtggcggtcggcgggcagggtgtggacggtccatccggcgtcggtgagggcggtggtgaaggatttcttgatggatcgtttgggtaggtcgatgggggcgtgggtgccgacccagatgcaccggtttttgaggtgggtggcgccgaggtggttcatgtcgcggaccatgttttgggtgagtgtgagggtgtcggggtcccattggacggggatgatgatgtggtctgcgatggtgatggcgtgttgccaggcggcgtcgaggtcgttgtttccggtgtcgaggatgatgacgtggaagcggcttcttagggcggtgatgatgcggtcgaggtcgtcggcggtggggggtgtgatgaggctgttgtggttgtcggtgatggtgggtaggcatgtgatggtggcccagccttctggttgccaggagatgtaggggtcgaggtcgcggggttgggaggcgaatcctgggtgacgggctgcgcgggcgaggtcgatgacggtgttgtcggtgtggcggggtgcgcgggtggagagggtgccgcgtgggttgatttccacgacgacgatgtcgtcgtgtcctgctgtggtggcgagggcttgggcaaggatgacggccagcggggttttgccggtgccgcctttgaggttggcgagggtgatgatgtggtcggtgagttgggcgggtgcggcggtgtggtgagggttggcggtgaggttggcgatggtgaacagggcatcgagatcgtcggtggtgttctgctcggtgggttgggggtcgccggagatgatcgggtcggcgcggcgcggctgccatgccggcctcaccactgtcacgaccaccacgggtctgctggcgctgtgtgggtgtcgtcggcgatgactcacgatcggcagtctcaccatcgtctcggtgatgctcggctagcgctggacccggtcaagttcgggccggctcacccagtggtgatgactcggtcacagaaccgctgccggtcgttatctcggacgtctcgactcctccagtcctgatgggcgttggagccacctacacctactctcagaacgaccccgacctcgtgtggggcgggggcagatgtcacttgggccaatcgagagcccaggtgatggggaaagcaggggtgtgatatctgtcctggaaaactgggcagctgctaccgtggattgacggatctccacgaaagaagggaatgcgaccatgcagatcaccgtcaagaccatcaaagatcatcgggttcgcactgtccagaccgccatgagcagcgccttggggattggttcccaggtagacatgctcgcccccggcggttccaccagctcgagttccggttcatgctgctcgtgctcgacctgcgcggtagtggcgcagcctcaagactgaacggctggtcagccccaggggcgtggcgctcatcgcgtcacgccccttctattcgctggacagggtgcgcgagctgaggaacatcgcggtgtgtgcgatgacgaggggcaggagcaagtctgtgcgggttgccaagtagccctgcgcgatggccatcacgctggccccgacggcggcgaagacacctccgatacgtcgcttcatgccgccgaattgcatcaggacgaataggactcccgcggtccacatccctccgggcatgcatctgggaaagatgaaccggaagatgatctcttcacaggagagctggagtactagcagcgtagcccccacggggagactcacctctactgacagacggatcgtcttcatccacccacccgagctggcatcgaccatttcggtggccatgcgcgaccggtggcctcgtgcctctcgctgcgtgtcgatccagccgagcagtccgtggacgctctccgctaggactcctgacgcgacagtctcaccaattcctaagcccacggcgaggaccgcgacgcccccctgcacggcaggctgtgtgacttggtggtcccaccaacccgccggcaggaccatgcgtgcgaggctgcacacgagcaggaggtggagggtcacgacgagcgacatctggaataccgcttgccgttcggcgatggtggcgttgggaaagagcggtaggccggcacgggcagcggcgctcgacagcttccgcaagagcggtttggagacgaagtagtaggcgacgtacagcgccagcgctgtcgcgatgatgatcatcggtctgccaccgagctgacccgccgatagccgtttctgttccaccaatactggctgttgtagatcaggtggcccagaacacaggcccagatcccccagaagatgaacaggatagtccccaaggcggcgagcgggatcttggagaggacctgtccccgtccgaacaccgagtggccgcaagcaaacaagagtgctcccacagcggtgagcgcgagccaggccggggttgctcgcagactgatcaccgggaccccgacccggaagccgacctcttctcctacagcgatgactagcaactgccacagcggcatgttctgaacggagcgcgcgactcgggctcgagtcacccacacgggctgttgagcgctcacatcaccactcaggtaccccggtgaggcacttcgcttagtactggggcccgatgtgcgagcattcgtgatgtgtcgcaggatccggttgtcaagccaagaggccagcagggctccggcgacagtgacgggtagcccgatcagcacgaggccccagccatgcggtgccgagaggtttctggccggcgtgcacgcgaggcaggcaagtgccaacactgccagcactacgacgtagatggtcgcataattcgacttgcgggtgacgttgccgaccatcttggccaaagtcgctggggaccagctgatgagtgcgatggtggtcagcaggaagcaggaccagacagacatccggcgcactcaggggtatgggtgcggctgtgggttttggaaaccgccatatgcggcgtagcgggggtgtgcccgcatgggtgcgctgggcagtgacagggcgagcagcccaggcgcccagagcctgacacagtgcagtcccagcccctggatctctatggtggtgaaatcttcgatgtacaggggtgacacacaggtgatgctgttgaccacgctctttaccagttccgcccccgtgtgggtgtcgtcaggtggcaggtcttcggcttgggcaatggtgcccgcgtcgaatttcgccacaactgattgcgcggcctgatagttcctcgcgtagtaggagacgttcgagtcgaggtcaagcatgtcctccgtggacatactggacgcgtcggcctcggcgtcgaaagacgtccataccgcgagcatccgaaccccgctgcactcgagaaacgccttgtacatggctgcttccagacccgcgtctgcacctaggccgacggcgacgaggggaagttggttgccactaccgaccatcatgcatgccacggtgaaatgcttgagcccgggagtcggaagccagtagaaacgcagttcgtggcttcggcccgctgcacgttccacgagccgctggatgcgctggaggcggggtccttcgacgcggatgcgcacaggtgacgaggctccataccacaggcccatcgcggcatctacctggatcaattcataagccgcggacagcgttgcggcgacgcgtgaagtgtggacggcggtgccggtcgtcacggccgttcccagccacggctcaccgtcgtgccgacgggggttgtaacccaggtaaaagaactgcgccgggatccactcctgccgggaggtcccgacacggggagtcttgacccatgtcatgggcaagtcgtcgcgataggtgtcgaacgcacctccagccactcgttgcgcgaagccgaatgcgcccagatcgagaacttcgtcctcggtccgggcgaggagttcctgacgagtcgcccagcgccgttcgaagggactatggagaatcccggtacccgcgcagtagcgctcgacggcctccgcgtagaccttgatctctgcctcaaactcgttcagccccaccccaccgatgtggtagctacccggcttggggtcgggccggtcaagcagtgcgtgcatccccgtgagttccccaccgttcacccgcacgcgggggccgagcgcggggtgcagcgagtagccgacggaagtcaccagcccgcatagcgggctgtaggtgcgccgcctgagccgggctgcggtctcgacggggtcgctatcctggcgaagcttcatcgctcgccccctgccgccagccactcacggatgtcgtagtacaggtccggagcggtttcaacctgcgctggtgcatcaaaacgggacataggtaggacgtcgttgtaggcgatctccatcgtcggtatgtagaccgacaacactttgttgcgcgtcgtgttgaggccgttgcgggcgatgctgacagcctcatgcgcgacgtgcgcggccaagatcgcgcgcaccgacgctgccacggccggcgctccggcccttacgcggtcggcagcggccacccgcatccaggacaggtagctctgccgttcgcgcaggttcatcgcgacccgctgctcgaaggtccggtaggacgaggtcgcaccagggacgacgtagggacccacgtacaaggccggcccgtctacagctgcgtggagccacgacaggtgggcgcgtcgggcgaacaggtcaagggcgcgcagcatagccgggttgttctgcgccagcgctaccacaaggagtggctgcaggtccggcgccgaacccagcaacgccaacatctgggaggcctcctgctccatgtgcaactcgtcggccgactgctcaagccgcaggcctgcgaagagggtggctgatggctgcgtgtcgtcagcgaggacggtagcctgcagcccctctccctcgagaatctgctggatatcgccggcgaggagcgcgtcgtcgctgaatacccacaccgggcgcgtctctctacctccatccatcttgtcctcaacgttttcgaccagcgcaccgatcgatgctaggtgggccatcacgtcgtcaagggccgcgcgggtcaatccgggcacccgggacacgatctcgggcggctgcagtccttggctcaacaagtccaaggccggccacagggtcccggtggcgtcgtcgtcctccagcgttgtgctctcggcgttccagacgcctcgacggaactccaccctgtccatcgagtaaggcaccatcatgaggcccggtgaaatgtggttggtcactttggctcctgtacagcctaggcttggacgcccacggtcatggtgtgggtcgcggtttggaaaatcccgtcgaggttgagtgcctgattgagttcgtcctcgtagaagcttgaggactcgactgaggcaagaccgagccccgtgcagaccaagttgatctgttgtgcgatcgccccgacttcttgaagggcgaacctcaaacccctggctccgtacttccgcatcgccctccacggcgagatgacgaacaccaagtgcactccggccgcatccgattgctccacggccggctcgccggccatcgaattcctcacgccgcgacagccctcttcaccggtcacgggcaccagtcgatcgatgaccggcgagtagcggtagacgccgcgactcaagccggacacccgttgtgcggacatgaagatagacacgggatacagccctccaccagacgggacagcgcgtacattataccgcacgatatcaccgctcgaacgtgggacatccacgtgccccgtcacaccggcagcacctctcagaaacgcagctacgtcacgcaggtctagggattcgccggtgtagttccgtccgctgcgccggcgggcgatcacttgctcgaggggtgcgcgcaccctgctggacctgggaagttcgatcacatcggcagcgaacgtgtcgcgatccatctgtccgtacgtaacgatcatggggtcaacgaaatagtcgccgaccgagacgttgaactccatatccccccgggcgatgcgcgaggcgagcaagaagtctgcagctgcgttagacagccccggcccatcagtgttgtcgcagcggaactcgtgggtccgaaaccccacaccttccgtgcccgggctctgcgctcgatacgacgtgatcgcagaactagccttccttaaaccgcccggagtagctaccatgaccgtcccctctgaggtctcccgaacacttgcgacaatagcagcatgtgggggcagccgccagaggcgggcatccttgtctcgacaaccattgacctccggattcgatatgtgcataatcatagtcgtgccaacacgaaacgtgtacgtctcggaagacgacctagacctgttcgccgaagccaccgagatcgctggaggcctgtccgcagcggtgttggaggccttgcgcagctacgtagacaggcaccatcgcgcggccggcggattcgacgagatcgagctggagctgcagaacgacggtatcgaccaccgtgtcaccttcatgggtcgccgcctgatacacatccgccgtccagatcccgagggaacccgcatagacactgtctacttgaccgccaaacaccaattcgccgttgccaccaaaatccaacgacggctgccagactggacgaccggccacgagcacatctggtccgacccggagacctggaatcgggagttctggatcgcaggtgacaagacgatggccgtgtatcccagccttgacaaactccgcgaagctgaccccaatgtggccgaacgcgccgaggccgcggtcaaaatcccgccgttcgaggtcctggacatctgatgacagaatcatcatcttcccggcggcaattggcaatgccggtgctgtcagtcacggatctagccaagaaatacgtggttcatggcggctacgaggtcccggcactcaacggtgtctcgtttgacctgcacccgggagagatgctgggtttgttcgggccaaacggtgctggaaagacgacgctggtcaggatcatcgcgggcctcttatcggcagattctggagacgtccactggggatcggatcaaggtcgggccaggttaggctacgtgtcccaaaagggtggactgcagtacgggctcacgtgccgggaagagatggtcttccacgcacaatgcttcggccagtccgccaagcaggcccggactagcgtcgacgaggtcgccgcgatgctgcactgcgattacctgatggagtgggacgtcggaaggctctccggtgggcaacgccgaatcatcgaggtagggctagcactcgtcaatcaaccatcggtcgtcctgctcgacgagcccaccctgggcctggaccccgcaacacgcctgtcgttgtggcaaacggtaaagtcggcacgccgtgagaccggtgctgccttcctcgtcaccacccactacattgacgaggtggccgagcacctgtccaacgtcagcgtgatcaaccacggaaccgtcgtcgccaacggctcgccagcgcacatccgagaaatgttcgcgaccggggaagtaacgctcggcgtggccgaggatacggtggacagtgcggtggacgtgttggctgggaccgcgttcgaggcgcaccccaccgaaaccgtcccggggatcgtggtcaggtccaggcatcccgacgtggacgcggccaagatcatcaccatcctggctggtcatggcatctcggtggactccatatccgtacgcgaggcgaccttggaagaggcgtttctcacgatcacaggcagtcgagacccggagaggcaaatcccatgaacacttgcttcaggcgatatgcggcgatgtcgctgagagcgcggcgtgatttggccctgacattcatccagcccctcgtctacctagccctcttcggaccgctcttcgtcacgacgatgaagatgtcgcagagagctaccgccgctacgggttactccctatacatcacgggcctgtccatccaaatggccatgacgatcggtgccttcgcggggctaaccatcatcctcgaataccgactcggcatcctcgaacggatctggagcacccccctcacggggagcaagatgatggcggggcgaatcgcgcgcgacgtcgttatgatgatgatgccgatactggtcgtcttcatcatcggcctggtgctgggaacacgccccagcccactgggcctggcgacctacttcgtgacagtgctcggcacaggagccacgttcgccggggtctcctacgcggtggcactcagaacgaagagcgaggcagcgctatccgcgatcttcaacctcatcctgctacccatcctcctgctgtcggggatcatgctgcccatgtcgttcgcaccacactggatcgccaccgctgcccacgtgaacccgttgtggtacctggtgcaaggcgcgcggaaccagttcagcgttctagggctcgtggcggcggccccatggagttgggctgtggccatcgtcatgtcagccgctgccttcggctgggcaagccacgaattcaacaagaggcgctgacacaaagaatggtgccgggaacccaggtccccggcaccaccgagtgcactcgcgacgtcaacgcaccgttgcggtcactgcgcaggtcgagcacgaggacgacgagcccgcgctgctgcaggtcgagccgccaggcgcgagcaggtcgacgttagcgtcggcgccgccgaagacggacgtgacggccggctgagaggtgcggatgcggtgctccagcgaggaggtggtggtgagtttcatgggaggtgctcctaggagtgagacgagaacaaaccctagcgataggttagcagtccgcaaccgactccgggaatagtagaagcgcgcatccgtagcggaagaccttagcctgattacagtgaccctgttcgcgtctcaacattattccacacccccgagcagcgaacgacaccgcgatgatgatccgtcgcctctccaccgaagaactccgcgcccacatcgcaccgggccgccgtcccgtgcatcagacctgccgtcaacgtcggccatgaagctgggaaggtggctctcgtctaggagcagacgcgggacgcctcctccaggttgggccggggaagtgtccggttcttgatgtaggtggcggtccctattgatgggcgttgaccgtgggaatgcggtcggcgaagggggtggcgaacccgttgagcgcaggcttccagcgcatgcatcaacgctgtctgccggccaccggcaagcctcacccgcccgtcatggccatcatcgaggtgccggtgaatcctcgacacatgatcccaactcccccggaggggcttccggggctgttcagccaccagatcagccaggcggcgagcccgactctgccacccggaccctgcagagcgtgcctgctgccgtcgtgtcgtgtcgggccagtgggccaccagatcggccacatccgtcttggcccatctccagcccgccagacccagggaggccatcacctcatcgacgccgcgccgggtggtctcatcaaccccgtcaaacagctcgggccacctcgatgatgccgtccgtgaacgatccagattcatgacatgctcctcttcacagatgccgacgacgatcaggccgtggccgtggcaacggggtgacctgccggcgcggctcacgacgttgagccggaaccacacgagacgcaccagtgtgctgcgccgtcttgagtcgggcgctgtactgggccctggcgctgtggtgaacagcccgacgaagcaccgaccgccggctgtcctcatcgccagggcgaggcatggggcgcggcatggtgcgcccggtagcagcatccatgagggtgatccggtcagccaaaatgccgagccggttttcccacttccggggccacggcaccagcaggtcacgctgacagcccacgccgtggcgtcggcagtccacaacattttctcacggccaggatgcgagtgcagcagctccaccggaacaccagcatcacgcacccgccgcatc

SEQ ID NO: 108 - DNA, 582 bp, Propionibacterium acnes
accagatcggccacatccgtcttggcccatctccagcccgccagacccagggaggccatcacctcatcgacgccgcgccgggtggtctcatcaaccccgtcaaacagctcgggccacctcgatgatgccgtccgtgaacgatccagattcatgacatgctcctcttcacagatgccgacgacgatcaggccgtggccgtggcaacggggtgacctgccggcgcggctcacgacgttgagccggaaccacacgagacgcaccagtgtgctgcgccgtcttgagtcgggcgctgtactgggccctggcgctgtggtgaacagcccgacgaagcaccgaccgccggctgtcctcatcgccagggcgaggcatggggcgcggcatggtgcgcccggtagcagcatccatgagggtgatccggtcagccaaaatgccgagccggttttcccacttccggggccacggcaccagcaggtcacgctgacagcccacgccgtggcgtcggcagtccacaacattttctcacggccaggatgcgagtgcagcagctccaccggaacaccagcatcacgcacccgccgcatc

SEQ ID NO: 109 - DNA, 16496 bp, Propionibacterium acnes
gtgttccagtgcctcgcgggcgtgatgttcttcttcggcaccttcttgccacatgcttcgcgcttcagcctcgccatccaagcgaacctggactgtgaacgagtcctcatcgggtccgtcctcattccacgcggcaatgatcccacgggcctcgtctgcgacctgactcaacttcatcgcctgcccgacagccccgagagccggaatctcgaacacccagatattcgcctcagccgagacctcacgatgggcgatcacttcgtaggtcgtctcaccttctactgtcgtgtccattacttccactccttcggaattttcacgcctgctcgctccagctgtgccaggacaccaactgacgtcagctggtgtcctgctggtatcgatacgcgcccggctccgccggggcgtccccagatttcatggcttcccttggcgttccgcagacgggcccatccttgagaacggagcagcttgaggacgtccttagttttctgcggtttcacacatcatagtatagccccacttaacttgtaaactaagcccctgtttacattttagttggtgcatgtgatccctgctcttatgacgtcgcccgacctggcgccttagacatgcactgttcatcctcaaccacactcaccgtcacgggtccgaaggcgaggtctatcaccattcgcatcgatgaagttgaagcaggatcgtccgcatcacgcactgccgatccggacagacgccaccggccgtaccgactgtttacgatctgccaccgcagactgctgccataaccgctatcacctctgatagtacgtttagtactatcagaggtgattcaagattctcctgtcgagcagccctacagtcacgaagtcctgcgatcgtcatcgcttaaggcagacggatggccatcggggaccactcgcaaagcaggggcgatcagcaacagtgatgtgccatgagcaagtactggtgcaccggctgtttactccgcccctagataaaccacgggtgcaggggtggacaccacaccatgaccgatgtggtgcccaccccatggctcacaggcaggccctatcgccgggagcactgctgcagatgaggctcagtaacctgccatgtctcacctggggccaaggtgccaagctccccacggaatctcaggcatcggaaaccagcagccgaacttccacagcatgagcgccctacgaaaaagcaggccgccgacggttctcaagaactcgccggcggcctgcatcgccactcgaactgtaaccgtggtccgaccccgtgcacaggtaagctccacactcccaccaggcatggccgaggcagtaccaagttgccgtggcccatcggcagatttggttaaattttgaaaagtcatatagactccttctgtaaatttttaaatctcataggactctcgccatcgccagccagcttcgacaggagtcccgatgtttcaccgagtgaaatatcggcaccgtttgagttgacctaaagctcaaaagatgctagaatccatcttacctcgttaggggcgttttgtcaaacgcccctatattgcgtgtcttcgcgcgtcgtagcgctgatgctgcgcctgtgtcgactatccgtttgtaagtactttcgatgacaccagcagtggctactcatgactggtgcgtgcgggtctaaagcagcagggaaaggaatcgcagtagaagccgcttgattcctatcacccctgatggtactatcagtactaacagagcagggcttactcgatgcgtgagaatcggggacatgctgagcctctcgtaggtcattggcctgctgggcgtcagtgtggcgcggttcgatccagtgaactctatcagctctgttagtactgtcagagttgatatattcgaccccaggaggagcccatgagttacatcgttcgcaccggaaatttggtcgacacccccgagctgcgtgagggagagcatggcccgtacacctacgctcgcgtcatcgtgtccgatcgcattcgccaggaggacggcagctacgtcaacgggccagcgatcgcctacgacgtcttggcgggtggcagccaagccgtgaatctggttgaagccgccaaggcgagcggcaacatccgcatcatgttcgcgggccgttaccgcgtcaccgagtggcggggtgagcagggcactcgtatccagcatgaggtccgagccgacgaagtgagcgtgagcctgctcggtcagagggtgaccgtggagcggcctcgaggtgacgtggcatccaaggagagcacgtcgttctgattgagtccgggggcacggtggtcgccgtggtaaaccgtgcccctgacagtactattgacactattggaggtatcagtgtgactgctcaaattttcgccttgtgcaaccagaagggtggcgtcggaaagtcgacatcgacgtttcatctggcccgtgccgcggtgttgcgtggccagcgtgtgcttgtcgtcgacaacgacccccagggcaacctgacgtctgtcgcggccgccgagcccgtgggggaggatcaggcggggctggccgatgtgctcagcgcgcgtgctccagagaccctccgcgatgtgatcgtgccgggaatctggtctggcctcgatgtcgtgccgacgtctggcatcacgctcggctgggtgcgtgacgaactcgtgatcgccggtgccggccgagaaggccggctgcgggaggccctggccggcgtcgaggacgactacgacgtgatcctgatcgactgtgctccatcgctcgatcagctcacgatcaacggcctggtggccgcccagggtgtcatcgtcgtgacgcactcgaagttgtggagcgccaacggcctcgccccgctgctcgacaccatcgacagcgtgcgcagctactacaacggcgcgctgcgcgtggcgggcatcatcgtcaaccagcacgaggagaacaccatcagcgggaaaacctggctcgacgagctgcatcaggctgccgagtcccggaagctgaccgtgcttgacccgccgatccccaagcgtgtcgtcatcgccgataccgtcgaggccgcgcgcggtctcgacgagtggggaagtgccgaggcggccgcgctcggccagttgtacgcccaccacctgacctgcatcgaaggagccctgtgatgacccgtccagccccccgaaagtcctcattgagcggatcaactccggtcgccccgccggctcagacggcgccggcaccgtctgccgcacctaccccccacaaggccgatgagtcacagacgagcagcaccacgaggaagtggcggcacaaggtgtcgttctaccaggacccggccgacaccgaccgggtgcgcggggcgatcctttacacgatgacgaccgagggcaaccggaacctgagccagttcgtcaacgatgccgtcatggccaaggtggtcgagctggaagtcaagtacaacgatggccagccattccccgctgtgggagcccgaggactaccccagggcggtgcagccgccgccggtgagtagaggaccatcgaccgtcgggggcttcaccatgcccccgaccctcggtcatcctgatcctcttgtcgatggtggtgacagtgggggattcacgcctcgttcagatcagaggaagtctcaccgcgtgattagtactatcaaatctgacagtactaacagagcagatagggttccctaggtcgagctgtatcacgccgacaaccagtgagccagtgatctacgaggggcgcaatatgcacccgatcggtagccgcgaaggcctcgccctgccccgatagtactatcaccactatcaatggtgctagtggtgagtttcttccattgatgacaacagcacagtgctgccgtctgtgtgcgggccaccagcccgcacacagttgccgtcgaggacgttgttcatgctctgtggtggccggtcctgagggcggctcgcaggatctcccggcgctcacggcgacgagcctggtagccaaggtctgcatgttcggcggcgagacgggctttgagggttgcggcttctgcacggcggtggagttggtcgtcgatgagttgggcgcgggccagacgccgcttatgggggttgtcgtgggtgaggggggcgtcgaggctgccgtcgtgggttagggccagggctgctcgttcggcgtcgtcgaggccgatgtggtggacggtcacgggtgcggtggtgacgtcgaggatgtccaggtggatgttgtggccgccgccgggggcttcggggaagtctggtgggctggcctggccggtgtcggggtcataccaggacaggccgatgatctcggcccagggtgggggcgggcagacggctcgcagaagggtgtgggccaggaacgtgttgcgggccatgatgcctccaagggtgaaaagcagtcgagtagcgatgacggcggggtagccgtctgctgggctgaggccgaccgggcccatgtcctcgatgctcttgtgctgcggccataccccaaagctaccaaacagtctttttaatctcaaagatacaaacagtgcttgacatattatctgcagcgaaagatactttcatcatggtggctgatcatgattacgcgactcctgacgatgagtggatgacacctcctcaggtggcccgtgtgattccgaacaccactgctcaggctgtccggcgctgggctgaggagggtcagcttcctggggcgtttcgtactccttctgggcgttggcatattccgtggtcggctgtggtgggcatcatggggtttgatccgcgtgagtccgcatcaccgagtgatcgtcaccagagctgacagagtcgtcgatgagctttcgagtgcagagctgatggcacgacggtctggatacttgtggagatgagagacgaccacatccagtcatggtcggggtacaccgaggggcagattcagcagtgctggcacgatgaggttgcccctgccattgactcgctcatggagcaggtaaggtctgttgccgagactcctgtgccgccgggttcgagattttacggcgatgagcagtgggccaagccttttcatccgtctactgcgatctgcggttcaatgggtccgccagcgatcacttgcacgcgctgaagctcctcgtctgggaagcgaacgtccaccatgtctatgcgccgtacacccttgctcgtgcatctattgaggcatcgtctactgctgtgtggctgttgagcacgaagacgcgcggagaacgtgtgctgcgagccttgcgatggtacgcgcaggattgtcacgactcgtgcaggttcatggatgatgagcagtatcgtgaccacctattgcggcgcattgaggggactgtcgctgcgggaaatctcgactcgcgcgctgctaggaaacggtaccgtgcaaccgatgttgtcgatgaggctgatcagctggttcccggaactctgagggcgtggcgagctttttctggtatggcccattcccgtatgtgggcatccagggggctgctcgacatggaagtgctgtccagtggccaaggaatggttacggcgaaggtgacgagcggatcggcccaaatcctttgggccgtcgtggcagctctgaatgttgctctcagtgccgctcgcttgtggcgtgattcgatgtgctcaccgtttgctgttgcccagtcggtagacgcgatgccagaggcgtttcgccgccctgtttagggtctgatcggggtagtgggtgttcacggggtcccaggttggccatggggcggcttggtgatgtgagttgggttgtgtggcagcctgggtgttgggtgtggcttcgttggccacgaaggcatgctcttccttgtgctgggacttgagtccccagtgctctcccctttgctagtggggggtggggtccccggaggtaggtcctccggggactttttctatgtctgtccgtgccccaggatttcgtatctaggcagtaccaattttgggttagttggaggtttctttggtaatggacagggtgagggtgatgaagaggtggccgtccttggtggcagaaattttctcgaacttcagctgaatgttgttatcagccactatctgttgggcggtgaggtgctcggagagcttctggaatccttcgcggatccacaggttgtaggggttggtgaccgagaccgaagggtatgggtcgaccttcagcgtcaggactggctggtctgggttgagggagttgatcttcaccagtttggggtaccggtcgcactcatgtgtctcttgtgttgggggccagcagtcgggggcccattcctcccagtggtcacgcatctcacgaagtactttcctgcatctcagcctctgcaggagctcgcgcgccaccgatgggagggctgccatgatgagggcaaggactgcgaacccgatgatgtaattgaccgtgtccctcgtcacgccgttcttgccgaggattccgatggcgaacgcgatgacgacaccgcccaggcacaggtgcatggggtcatgctgtgatggtttttcttcttcagcgactggtggggctatagtcatgtgtgccccttagtactaagtgatactggtgggttgcttttccccggtggccgtgtgcaagacggccaccggggttttccttcatgttcctgattttatctgcccggtgtggcgttttcatctttgtgtgggtggttcgcctggggtcttggagtgtggtgacgcggtgatggtcacggtgacggtgactgtggcgcgtggcgggtgaggtggttctttcctggtctggtgtgtggcccaggtgagtgtggtgatgagggccagggtgaggatgatgaccagggtggggagtagtttgtctggccggtgtcgccgggcttggtggcgcggcatgtttttccagggtgtgtctccgaacaggtcgtcgtcggaggggtcgtcgtggttcatagggtggccttggcgatggtggtgggcgagtttggtccaggtgatggtgccgtcggaggcgatgtggcggtcggcgggcagggtgtggacggtccatccggcgtcggtgagggcggtggtgaaggatttcttgatggatcgtttgggtaggtcgatgggggcgtgggtgccgacccagatgcaccggtttttgaggtgggtggcgccgaggtggttcatgtcgcggaccatgttttgggtgagtgtgagggtgtcggggtcccattggacggggatgatgatgtggtctgcgatggtgatggcgtgttgccaggcggcgtcgaggtcgttgtttccggtgtcgaggatgatgacgtggaagcggcttcttagggcggtgatgatgcggtcgaggtcgtcggcggtggggggtgtgatgaggctgttgtggttgtcggtgatggtgggtaggcatgtgatggtggcccagccttctggttgccaggagatgtaggggccgaggtcgcggggttgggaggcgaatcctgggtgacgggctgcgcgggcgaggtcgatgacggtgttgtcggtgtggcggggtgcgcgggtggagagggtgccgcgtgggttgatttccacgacgacgatgtcgtcgtgtcctgctgtggtggcgagggcttgggcaaggatgacggccagcggggttttgccggtgccgcctttgaggttggcgagggtgatgatgtggtcggtgagttgggcgggtgcggcggtgtggtgagggttggcggtgaggttggcgatggtgaacagggcatcgagatcgtcggtggtgttctgctcggtgggttgggggtcgccggagatgatcgggtcggcgcggcgcggctgccatgccggcctcaccactgtcacgaccaccacgggtctgctggcgctgtgtgggtgtcgtcggcgatgactcacgatcggcagtctcaccatcgtctcggtgatgctcggctagcgctggacccggtcaagttcgggccggctcacccagtggtgatgactcggtcacagaaccgctgccggtcgttatctcggacgtctcgactcctccagtcctgatgggcgttggagccacctacacctactctcagaacgaccccgacctcgtgtggggcgggggcagatgtcacttgggccaatcgagagcccaggtgatggggaaagcaggggtgtgatatctgtcctggaaaactgggcagctgctaccgtggattgacggatctccacgaaagaagggaatgcgaccatgcagatcaccgtcaagaccatcaaagatcatcgggttcgcactgtccagaccgccatgagcagcgccttggggattggttcccaggtagacatgctcgcccccggcggttccaccagctcgagttccggttcatgctgctcgtgctcgacctgcgcggtagtggcgcagcctcaagactgaacggctggtcagccccaggggcgtggcgctcatcgcgtcacgccccttctattcgctggacagggtgcgcgagctgaggaacatcgcggtgtgtgcgatgacgaggggcaggagcaagtctgtgcgggttgccaagtagccctgcgcgatggccatcacgctggccccgacggcggcgaagacacctccgatacgtcgcttcatgccgccgaattgcatcaggacgaataggactcccgcggtccacatccctccgggcatgcatctgggaaagatgaaccggaagatgatctcttcacaggagagctggagtactagcagcgtagcccccacggggagactcacctctactgacagacggatcgtcttcatccacccacccgagctggcatcgaccatttcggtggccatgcgcgaccggtggcctcgtgcctctcgctgcgtgtcgatccagccgagcagtccgtggacgctctccgctaggactcctgacgcgacagtctcaccaattcctaagcccacggcgaggaccgcgacgcccccctgcacggcaggctgtgtgacttggtggtcccaccaacccgccggcaggaccatgcgtgcgaggctgcacacgagcaggaggtggagggtcacgacgagcgacatctggaataccgcttgccgttcggcgatggtggcgttgggaaagagcggtaggccggcacgggcagcggcgctcgacagcttccgcaagagcggtttggagacgaagtagtaggcgacgtacagcgccagcgctgtcgcgatgatgatcatcggtctgccaccgagctgacccgccgatagccgtttctgttccaccaatactggctgttgtagatcaggtggcccagaacacaggcccagatcccccagaagatgaacaggatagtccccaaggcggcgagcgggatcttggagaggacctgtccccgtccgaacaccgagtggccgcaagcaaacaagagtgctcccacagcggtgagcgcgagccaggccggggttgctcgcagactgatcaccgggaccccgacccggaagccgacctcttctcctacagcgatgactagcaactgccacagcggcatgttctgaacggagcgcgcgactcgggctcgagtcacccacacgggctgttgagcgctcacatcaccactcaggtaccccggtgaggcacttcgcttagtactggggcccgatgtgcgagcattcgtgatgtgtcgcaggatccggttgtcaagccaagaggccagcagggctccggcgacagtgacgggtagcccgatcagcacgaggccccagccatgcggtgccgagaggtttctggccggcgtgcacgcgaggcaggcaaatgccatcactgccagcactacgacgtagatggtcgcataattcgacttgcgggtgacgttgccgaccatcttggccaaagtcgctggggaccagctgatgagtgcgatggtggtcagcaggaagcaggaccagacagacatccggcgcactcaggggtatgggtgcggctgtgggttttggaaaccgccatatgcggcgtagcgggggtgtgcccgcatgggtgcgctgggcagtgacagggcgagcagcccaggcgcccagagcctgacacagtgcagtcccagcccctggatctctatggtggtgaaatcttcgatgtacaggggtgacacacaggtgatgctgttgaccacgctctttaccagttccgcccccgtgtgggtgtcgtcaggtggcaggtcttcggcttgggcaatggtgcccgcgtcgaatttcgccacaactgattgcgcggcctgatagttcctcgcgtagtaggagacgttcgagtcgaggtcaagcatgtcctccgtggacatactggacgcgtcggcctcggcgtcgaaagacgtccataccgcgagcatccgaaccccgctgcactcgagaaacgccttgtacatggctgcttccagacccgcgtctgcacctaggccgacggcgacgaggggaagttggttgccactaccgaccatcatgcatgccacggtgaaatgcttgagcccgggagtcggaagccagtagaaacgcagttcgtggcttcggcccgctgcacgttccacgagccgctggatgcgctggaggcggggtccttcgacgcggatgcgcacaggtgacgaggctccataccacaggcccatcgcggcatctacctggatcaattcataagccgcggacagcgttgcggcgacgcgtgaagtgtggacggcggtgccggtcgtcacggccgttcccagccacggctcaccgtcgtgccgacgggggttgtaacccaggtaaaagaactgcgccgggatccactcctgccgggaggtcccgacacggggagtcttgacccatgtcatgggcaagtcgtcgcgataggtgtcgaacgcacctccagccactcgttgcgcgaagccgaatgcgcccagatcgagaacttcgtcctcggtccgggcgaggagttcctgacgagtcgcccagcgccgttcgaagggactatggagaatcccggtacccgcgcagtagcgctcgacggcctccgcgtagaccttgatctctgcctcaaactcgttcagccccaccccaccgatgtggtagctacccggcttggggtcgggccggtcaagcagtgcgtgcatccccgtgagttccccaccgttcacccgcacgcgggggccgagcgcggggtgcagcgagtagccgacggaagtcaccagcccgcatagcgggctgtaggtgcgccgcctgagccgggctgcggtctcgacggggtcgctatcctggcgaagcttcatcgctcgccccctgccgccagccactcacggatgtcgtagtacaggtccggagcggtttcaacctgcgctggtgcatcaaaacgggacataggtaggacgtcgttgtaggcgatctccatcgtcggtatgtagaccgacaacactttgttgcgcgtcgtgttgaggccgttgcgggcgatgctgacagcctcatgcgcgacgtgcgcggccaagatcgcgcgcaccgacgctgccacggccggcgctccggcccttacgcggtcggcagcggccacccgcatccaggacaggtagctctgccgttcgcgcaggttcatcgcgacccgctgctcgaaggtccggtaggacgaggtcgcaccagggacgacgtagggacccacgtacaaggccggcccgtctacagctgcgtggagccacgacaggtgggcgcgtcgggcgaacaggtcaagggcgcgcagcatagccgggttgttctgcgccagcgctaccacaaggagtggctgcaggtccggcgccgaacccagcaacgccaacatctgggaggcctcctgctccatgtgcaactcgtcggccgactgctcaagccgcaggcctgcgaagagggtggctgatggctgcgtgtcgtcagcgaggacggtagcctgcagcccctctccctcgagaatctgctggatatcgccggcgaggagcgcgtcgtcgctgaatacccacaccgggcgcgtctctctacctccatccatcttgtcctcaacgttttcgaccagcgcaccgatcgatgctaggtgggccatcacgtcgtcaagggccgcgcgggtcaatccgggcacccgggacacgatctcgggcggctgcagtccttggctcaacaagtccaaggccggccacagggtcccggtggcgtcgtcgtcctccagcgttgtgctctcggcgttccagacgcctcgacggaactccaccctgtccatcgagtaaggcaccatcatgaggcccggtgaaatgtggttggtcactttggctcctgtacagcctaggcttggacgcccacggtcatggtgtgggtcgcggtttggaaaatcccgtcgaggttgagtgcctgattgagttcgtcctcgtagaagcttgaggactcgactgaggcaagaccgagccccgtgcagaccaagttgatctgttgtgcgatcgccccgacttcttgaagggcgaacctcaaacccctggctccgtacttccgcatcgccctccacggcgagatgacgaacaccaagtgcactccggccgcatccgattgctccacggccggctcgccggccatcgaattcctcacgccgcgacagccctcttcaccggtcacgggcaccagtcgatcgatgaccggcgagtagcggtagacgccgcgactcaagccggacacccgttgtgcggacatgaagatagacacgggatacagccctccaccagacgggacagcgcgtacattataccgcacgatatcaccgctcgaacgtgggacatccacgtgccccgtcacaccggcagcacctctcagaaacgcagctacgtcacgcaggtctagggattcgccggtgtagttccgtccgctgcgccggcgggcgatcacttgctcgaggggtgcgcgcaccctgctggacctgggaagttcgatcacatcggcagcgaacgtgtcgcgatccatctgtccgtacgtaacgatcatggggtcaacgaaatagtcgccgaccgagacgttgaactccatatccccccgggcgatgcgcgaggcgagcaagaagtctgcagctgcgttagacagccccggcccatcagtgttgtcgcagcggaactcgtgggtccgaaaccccacaccttccgtgcccgggctctgcgctcgatacgacgtgatcgcagaactagccttccttaaaccgcccggagtagctaccatgaccgtcccctctgaggtctcccgaacacttgcgacaatagcagcatgtgggggcagccgccagaggcgggcatccttgtctcgacaaccattgacctccggattcgatatgtgcataatcatagtcgtgccaacacgaaacgtgtacgtctcggaagacgacctagacctgttcgccgaagccaccgagatcgctggaggcctgtccgcagcggtgttggaggccttgcgcagctacgtagacaggcaccatcgcgcggccggcggattcgacgagatcgagctggagctgcagaacgacggtatcgaccaccgtgtcaccttcatgggtcgccgcctgatacacatccgccgtccagatcccgagggaacccgcatagacactgtctacttgaccgccaaacaccaattcgccgttgccaccaaaatccaacgacggctgccagactggacggccggccacgagcacatctggtccgacccggagacctggaatcgggagttctggatcgcaggtgacaagacgatggccgtgtatcccagccttgacaaactccgcgaagctgaccccaatgtggccgaacgcgccgaggccgcggtcaaaatcccgccgttcgaggtcctggacatctgatgacagaatcatcatcttcccggcggcaattggcaatgccggtgctgtcagtcacggatctagccaagaaatacgtggttcatggcggctacgaggtcccggcactcaacggtgtctcgtttgacctgcacccgggagagatgctgggtttgttcgggccaaacggtgctggaaagacgacgctggtcaggatcatcgcgggcctcttatcggcagattctggagacgtccactggggatcggatcaaggtcgggccaggttaggctacgtgtcccaaaagggtggactgcagtacgggctcacgtgccgggaagagatggtcttccacgcacaatgcttcggccagtccgccaagcaggcccggactagcgtcgacgaggtcgccgcgatgctgcactgcgattacctgatggagtgggacgtcggaaggctctccggtgggcaacgccgaatcatcgaggtagggctagcactcgtcaatcaaccatcggtcgtcctgctcgacgagcccaccctgggcctggaccccgcaacacgcctgtcgttgtggcaaacggtaaagtcggcacgccgtgagaccggtgctgccttcctcgtcaccacccactacattgacgaggtggccgagcacctgtccaacgtcagcgtgatcaaccacggaaccgtcgtcgccaacggctcgccagcgcacatccgagaaatgttcgcgaccggggaagtaacgctcggcgtggccgaggatacggtggacagtgcggtggacgtgttggctgggaccgcgttcgaggcgcaccccaccgaaaccgtcccggggatcgtggtcaggtccaggcatcccgacgtggacgcggccaagatcatcaccatcctggctggtcatggcatctcggtggactccatatccgtacgcgaggcgaccttggaagaggcgtttctcacgatcacaggcagtcgagacccggagaggcaaatcccatgaacacttgcttcaggcgatatgcggcgatgtcgctgagagcgcggcgtgatttggccctgacattcatccagcccctcgtctacctagccctcttcggaccgctcttcgtcacgacgatgaagatgtcgcagagagctaccgccgctacgggttactccctatacatcacgggcctgtccatccaaatggccatgacgatcggtgccttcgcggggctaaccatcatcctcgaataccgactcggcatcctcgaacggatctggagcacccccctcacggggagcaagatgatggcggggcgaatcgcgcgcgacgtcgttatgatgatgatgccgatactggtcgtcttcatcatcggcctggtgctgggaacacgccccagcccactgggcctggcgacctacttcgtgacagtgctcggcacaggagccacgttcgccggggtctcctacgcggtggcactcagaacgaagagcgaggcagcgctatccgcgatcttcaacctcatcctgctacccatcctcctgctgtcggggatcatgctgcccatgtcgttcgcaccacactggatcgccaccgctgcccacgtgaacccgttgtggtacctggtgcaaggcgcgcggaaccagttcagcgttctagggctcgtggcggcggccccatggagttgggctgtggccatcgtcatgtcagccgctgccttcggctgggcaagccacgaattcaacaagaggcgctgacacaaagaatggtgccgggaacccaggtccccggcaccaccgagtgcactcgcgacgtcaacgcaccgttgcggtcactgcgcaggtcgagcacgaggacgacgagcccgcgctgctgcaggtcgagccgccaggcgcgagcaggtcgacgttagcgtcggcgccgccgaagacggacgtgacggccggctgagaggtgcggatgcggtgctccagcgaggaggtggtggtgagtttcatgggaggtgctcctaggagtgagacgagaacaaaccctagcgataggttagcagtccgcaaccgactccgggaatagtagaagcgcgcatccgtagcggaagaccttagcctgattacagtgaccctgttcgcgtctcaacattattccacacccccgagcagcgaacgacaccgcgatgatgatccgtcgcctctccaccgaagaactccgcgcccacatcgcaccgggccgccgtcccgtgcatcagacctgccgtcaacgtcggccatgaagctgggaaggtggctctcgtctaggagcagacgcgggacgcctcctccaggttgggccggggaagtgtccggttcttgatgtaggtggcggtccctattgatgggcgttgaccgtgggaatgcggtcggcgaagggggtggcgaacccgttgagcgcaggcttccagcgcatgcatcaacgctgtctgccggccaccggcaagcctcacccgcccgtcatggccatcatcgaggtgccggtgaatcctcgacacatgatcccaactcccccggaggggcttccggggctgttcagccaccagatcagccaggcggcgagcccgactctgccacccggaccctgcagagcgtgcctgctgccgtcgtgtcgtgtcgggccagtgggccaccagatcggccacatccgtcttggcccatctcc

SEQ ID NO: 110 - DNA, 16494 bp, Propionibacterium acnes
gtgttccagtgcctcgcgggcgtgatgttcttcttcggcaccttcttgccacatgcttcgcgcttcagcctcgccatccaagcgaacctggactgtgaacgagtcctcatcgggtccgtcctcattccacgcggcaatgatcccacgggcctcgtctgcgacctgactcaacttcatcgcctgcccgacagccccgagagccggaatctcgaacacccagatattcgcctcagccgagacctcacgatgggcgatcacttcgtaggtcgtctcaccttctactgtcgtgtccattacttccactccttcggaattttcacgcctgctcgctccagctgtgccaggacaccaactgacgtcagctggtgtcctgctggtatcgatacgcgcccggctccgccggggcgtccccagatttcatggcttcccttggcgttccgcagacgggcccatccttgagaacggagcagcttgaggacgtccttagttttctgcggtttcacacatcatagtatagccccacttaacttgtaaactaagcccctgtttacattttagttggtgcatgtgatccctgctcttatgacgtcgcccgacctggcgccttagacatgcactgttcatcctcaaccacactcaccgtcacgggtccgaaggcgaggtctatcaccattcgcatcgatgaagttgaagcaggatcgtccgcatcacgcactgccgatccggacagacgccaccggccgtaccgactgtttacgatctgccaccgcagactgctgccataaccgctatcacctctgatagtacgtttagtactatcagaggtgattcaagattctcctgtcgagcagccctacagtcacgaagtcctgcgatcgtcatcgcttaaggcagacggatggccatcggggaccactcgcaaagcaggggcgatcagcaacagtgatgtgccatgagcaagtactggtgcaccggctgtttactccgcccctagataaaccacgggtgcaggggtggacaccacaccatgaccgatgtggtgcccaccccatggctcacaggcaggccctatcgccgggagcactgctgcagatgaggctcagtaacctgccatgtctcacctggggccaaggtgccaagctccccacggaatctcaggcatcggaaaccagcagccgaacttccacagcatgagcgccctacgaaaaagcaggccgccgacggttctcaagaactcgccggcggcctgcatcgccactcgaactgtaaccgtggtccgaccccgtgcacaggtaagctccacactcccaccaggcatggccgaggcagtaccaagttgccgtggcccatcggcagatttggttaaattttgaaaagtcatatagactccttctgtaaatttttaaatctcataggactctcgccatcgccagccagcttcgacaggagtcccgatgtttcaccgagtgaaatatcggcaccgtttgagttgacctaaagctcaaaagatgctagaatccatcttacctcgttaggggcgttttgtcaaacgcccctatattgcgtgtcttcgcgcgtcgtagcgctgatgctgcgcctgtgtcgactatccgtttgtaagtactttcgatgacaccagcagtggctactcatgactggtgcgtgcgggtctaaagcagcagggaaaggaatcgcagtagaagccgcttgattcctatcacccctgatggtactatcagtactaacagagcagggcttactcgatgcgtgagaatcggggacatgctgagcctctcgtaggtcattggcctgctgggcgtcagtgtggcgcggttcgatccagtgaactctatcagctctgttagtactgtcagagttgatatattcgaccccaggaggagcccatgagttacatcgttcgcaccggaaatttggtcgacacccccgagctgcgtgagggagagcatggcccgtacacctacgctcgcgtcatcgtgtccgatcgcattcgccaggaggacggcagctacgtcaacgggccagcgatcgcctacgacgtcttggcgggtggcagccaagccgtgaatctggttgaagccgccaaggcgagcggcaacatccgcatcatgttcgcgggccgttaccgcgtcaccgagtggcggggtgagcagggcactcgtatccagcatgaggtccgagccgacgaagtgagcgtgagcctgctcggtcagagggtgaccgtggagcggcctcgaggtgacgtggcatccaaggagagcacgtcgttctgattgagtccgggggcacggtggtcgccgtggtaaaccgtgcccctgacagtactattgacactattggaggtatcagtgtgactgctcaaattttcgccttgtgcaaccagaagggtggcgtcggaaagtcgacatcgacgtttcatctggcccgtgccgcggtgttgcgtggccagcgtgtgcttgtcgtcgacaacgacccccagggcaacctgacgtctgtcgcggccgccgagcccgtgggggaggatcaggcggggctggccgatgtgctcagcgcgcgtgctccagagaccctccgcgatgtgatcgtgccgggaatctggtctggcctcgatgtcgtgccgacgtctggcatcacgctcggctgggtgcgtgacgaactcgtgatcgccggtgccggccgagaaggccggctgcgggaggccctggccggcgtcgaggacgactacgacgtgatcctgatcgactgtgctccatcgctcgatcagctcacgatcaacggcctggtggccgcccagggtgtcatcgtcgtgacgcactcgaagttgtggagcgccaacggcctcgcccagctgctcgacaccatcgacagcgtgcgcagctactacaacggcgcgctgcgcgtggcgggcatcatcgtcaaccagcacgaggagaacaccatcagcgggaaaacctggctcgacgagctgcatcaggctgccgagtcccggaagctgaccgtgcttgacccgccgatccccaagcgtgtcgtcatcgccgataccgtcgaggccgcgcgcggtctcgacgagtggggaagtgccgaggcggccgcgctcggccagttgtacgcccaccacctgacctgcatcgaaggagccctgtgatgacccgtccagccccccgaaagtcctcattgagcggatcaactccggtcgccccgccggctcagacggcgccggcaccgtctgccgcacctaccccccacaaggccgatgagtcacagacgagcagcaccacgaggaagtggcggcacaaggtgtcgttctaccaggacccggccgacaccgaccgggtgcgcggggcgatcctttacacgatgacgaccgagggcaaccggaacctgagccagttcgtcaacgatgccgtcatggccaaggtggtcgagctggaagtcaagtacaacgatggccagccattccccgctgtgggagcccgaggactaccccagggcggtgcagccgccgccggtgagtagaggaccatcgaccgtcgggggcttcaccatgcccccgaccctcggtcatcctgatcctcttgtcgatggtggtgacagtgggggattcacgcctcgttcagatcagaggaagtctcaccgcgtgattagtactatcaaatctgacagtactaacagagcagatagggttccctaggtcgagctgtatcacgccgacaaccagtgagccagtgatctacgaggggcgcaatatgcacccgatcggtagccgcgaaggcctcgccctgccccgatagtactatcaccactatcaatggtgctagtggtgagtttcttccattgatgacaacagcacagtgctgccgtctgtgtgcgggccaccagcccgcacacagttgccgtcgaggacgttgttcatgctctgtggtggccggtcctgagggcggctcgcaggatctcccggcgctcacggcgacgagcctggtagccaaggtctgcatgttcggcggcgagacgggctttgagggttgcggcttctgcacggcggtggagttggtcgtcgatgagttgggcgcgggccagacgccgcttatgggggttgtcgtgggtgaggggggcgtcgaggctgccgtcgtgggttagggccagggctgctcgttcggcgtcgtcgaggccgatgtggtggacggtcacgggtgcggtggtgacgtcgaggatgtccaggtggatgttgtggccgccgccgggggcttcggggaagtctggtgggctggcctggccggtgtcggggtcataccaggacaggccgatgatctcggcccagggtgggggcgggcagacggctcgcagaagggtgtgggccaggaacgtgttgcgggccatgatgcctccaagggtgaaaagcagtcgagtagcgatgacggcggggtagccgtctgctgggctgaggccgaccgggcccatgtcctcgatgctcttgtgctgcggccataccccaaagctaccaaacagtctttttaatctcaaagatacaaacagtgcttgacatattatctgcagcgaaagatactttcatcatggtggctgatcatgattacgcgactcctgacgatgagtggatgacacctcctcaggtggcccgtgtgattccgaacaccactgctcaggctgtccggcgctgggctgaggagggtcagcttcctggggcgtttcgtactccttctgggcgttggcatattccgtggtcggctgtggtgggcatcatggggtttgatccgcgtgagtccgcatcaccgagtgatcgtcaccagagctgacagagtcgtcgatgagctttcgagtgcagagctgatggcacgacggtctggatacttgtggagatgagagacgaccacatccagtcatggtcggggtacaccgaggggcagattcagcagtgctggcacgatgaggttgcccctgccattgactcgctcatggagcaggtaaggtctgttgccgagactcctgtgccgccgggttcgagattttacggcgatgagcagtgggccaagccttttcatccgtctactgcgatctgcggttcaatgggtccgccagcgatcacttgcacgcgctgaagctcctcgtctgggaagcgaacgtccaccatgtctatgcgccgtacacccttgctcgtgcatctattgaggcatcgtctactgctgtgtggctgttgagcacgaagacgcgcggagaacgtgtgctgcgagccttgcgatggtacgcgcaggattgtcacgactcgtgcaggttcatggatgatgagcagtatcgtgaccacctattgcggcgcattgaggggactgtcgctgcgggaaatctcgactcgcgcgctgctaggaaacggtaccgtgcaaccgatgttgtcgatgaggctgatcagctggttcccggaactctgagggcgtggcgagctttttctggtatggcccattcccgtatgtgggcatccagggggctgctcgacatggaagtgctgtccagtggccaaggaatggttacggcgaaggtgacgagcggatcggcccaaatcctttgggccgtcgtggcagctctgaatgttgctctcagtgccgctcgcttgtggcgtgattcgatgtgctcaccgtttgctgttgcccagtcggtagacgcgatgccagaggcgtttcgccgccctgtttagggtctgatcggggtagtgggtgttcacggggtcccaggttggccatggggcggcttggtgatgtgagttgggttgtgtggcagcctgggtgttgggtgtggcttcgttggccacgaaggcatgctcttccttgtgctgggacttgagtccccagtgctctcccctttgctagtggggggtggggtccccggaggtaggtcctccggggactttttctatgtctgtccgtgccccaggatttcgtatctaggcagtaccaattttgggttagttggaggtttctttggtaatggacagggtgagggtgatgaagaggtggccgtccttggtggcagaaattttctcgaacttcagctgaatgttgttatcagccactatctgttgggcggtgaggtgctcggagagcttctggaatccttcgcggatccacaggttgtaggggttggtgaccgagaccgaagggtatgggtcgaccttcagcgtcaggactggctggtctgggttgagggagttgatcttcaccagtttggggtaccggtcgcactcatgtgtctcttgtgttgggggccagcagtcgggggcccattcctcccagtggtcacgcatctcacgaagtactttcctgcatctcagcctctgcaggagctcgcgcgccaccgatgggagggctgccatgatgagggcaaggactgcgaacccgatgatgtaattgaccgtgtccctcgtcacgccgttcttgccgaggattccgatggcgaacgcgatgacgacaccgcccaggcacaggtgcatggggtcatgctgtgatggtttttcttcttcagcgactggtggggctatagtcatgtgtgccccttagtactaagtgatactggtgggttgcttttccccggtggccgtgtgcaagacggccaccggggttttccttcatgttcctgattttatctgcccggtgtggcgttttcatctttgtgtgggtggttcgcctggggtcttggagtgtggtgacgcggtgatggtcacggtgacggtgactgtggcgcgtggcgggtgaggtggttctttcctggtctggtgtgtggcccaggtgagtgtggtgatgagggccagggtgaggatgatgaccagggtggggagtagtttgtctggccggtgtcgccgggcttggtggcgcggcatgtttttccagggtgtgtctccgaacaggtcgtcgtcggaggggtcgtcgtggttcatagggtggccttggcgatggtggtgggcgagtttggtccaggtgatggtgccgtcggaggcgatgtggcggtcggcgggcagggtgtggacggtccatccggcgtcggtgagggcggtggtgaaggatttcttgatggatcgtttgggtaggtcgatgggggcgtgggtgccgacccagatgcaccggtttttgaggtgggtggcgccgaggtggttcatgtcgcggaccatgttttgggtgagtgtgagggtgtcggggtcccattggacggggatgatgatgtggtctgcgatggtgatggcgtgttgccaggcggcgtcgaggtcgttgtttccggtgtcgaggatgatgacgtggaagcggcttcttagggcggtgatgatgcggtcgaggtcgtcggcggtggggggtgtgatgaggctgttgtggttgtcggtgatggtgggtaggcatgtgatggtggcccagccttctggttgccaggagatgtaggggccgaggtcgcggggttgggaggcgaatcctgggtgacgggctgcgcgggcgaggtcgatgacggtgttgtcggtgtggcggggtgcgcgggtggagagggtgccgcgtgggttgatttccacgacgacgatgtcgtcgtgtcctgctgtggtggcgagggcttgggcaaggatgacggccagcggggttttgccggtgccgcctttgaggttggcgagggtgatgatgtggtcggtgagttgggcgggtgcggcggtgtggtgagggttggcggtgaggttggcgatggtgaacagggcatcgagatcgtcggtggtgttctgctcggtgggttgggggtcgccggagatgatcgggtcggcgcggcgcggctgccatgccggcctcaccactgtcacgaccaccacgggtctgctggcgctgtgtgggtgtcgtcggcgatgactcacgatcggcagtctcaccatcgtctcggtgatgctcggctagcgctggacccggtcaagttcgggccggctcacccagtggtgatgactcggtcacagaaccgctgccggtcgttatctcggacgtctcgactcctccagtcctgatgggcgttggagccacctacacctactctcagaacgaccccgacctcgtgtggggcgggggcagatgtcacttgggccaatcgagagcccaggtgatggggaaagcaggggtgtgatatctgtcctggaaaactgggcagctgctaccgtggattgacggatctccacgaaagaagggaatgcgaccatgcagatcaccgtcaagaccatcaaagatcatcgggttcgcactgtccagaccgccatgagcagcgccttggggattggttcccaggtagacatgctcgcccccggcggttccaccagctcgagttccggttcatgctgctcgtgctcgacctgcgcggtagtggcgcagcctcaagactgaacggctggtcagccccaggggcgtggcgctcatcgcgtcacgccccttctattcgctggacagggtgcgcgagctgaggaacatcgcggtgtgtgcgatgacgaggggcaggagcaagtctgtgcgggttgccaagtagccctgcgcgatggccatcacgctggccccgacggcggcgaagacacctccgatacgtcgcttcatgccgccgaattgcatcaggacgaataggactcccgcggtccacatccctccgggcatgcatctgggaaagatgaaccggaagatgatctcttcacaggagagctggagtactagcagcgtagcccccacggggagactcacctctactgacagacggatcgtcttcatccacccacccgagctggcatcgaccatttcggtggccatgcgcgaccggtggcctcgtgcctctcgctgcgtgtcgatccagccgagcagtccgtggacgctctccgctaggactcctgacgcgacagtctcaccaattcctaagcccacggcgaggaccgcgacgcccccctgcacggcaggctgtgtgacttggtggtcccaccaacccgccggcaggaccatgcgtgcgaggctgcacacgagcaggaggtggagggtcacgacgagcgacatctggaataccgcttgccgttcggcgatggtggcgttgggaaagagcggtaggccggcacgggcagcggcgctcgacagcttccgcaagagcggtttggagacgaagtagtaggcgacgtacagcgccagcgctgtcgcgatgatgatcatcggtctgccaccgagctgacccgccgatagccgtttctgttccaccaatactggctgttgtagatcaggtggcccagaacacaggcccagatcccccagaagatgaacaggatagtccccaaggcggcgagcgggatcttggagaggacctgtccccgtccgaacaccgagtggccgcaagcaaacaagagtgctcccacagcggtgagcgcgagccaggccggggttgctcgcagactgatcaccgggaccccgacccggaagccgacctcttctcctacagcgatgactagcaactgccacagcggcatgttctgaacggagcgcgcgactcgggctcgagtcacccacacgggctgttgagcgctcacatcaccactcaggtaccccggtgaggcacttcgcttagtactggggcccgatgtgcgagcattcgtgatgtgtcgcaggatccggttgtcaagccaagaggccagcagggctccggcgacagtgacgggtagcccgatcagcacgaggccccagccatgcggtgccgagaggtttctggccggcgtgcacgcgaggcaggcaaatgccatcactgccagcactacgacgtagatggtcgcataattcgacttgcgggtgacgttgccgaccatcttggccaaagtcgctggggaccagctgatgagtgcgatggtggtcagcaggaagcaggaccagacagacatccggcgcactcaggggtatgggtgcggctgtgggttttggaaaccgccatatgcggcgtagcgggggtgtgcccgcatgggtgcgctgggcagtgacagggcgagcagcccaggcgcccagagcctgacacagtgcagtcccagcccctggatctctatggtggtgaaatcttcgatgtacaggggtgacacacaggtgatgctgttgaccacgctctttaccagttccgcccccgtgtgggtgtcgtcaggtggcaggtcttcggcttgggcaatggtgcccgcgtcgaatttcgccacaactgattgcgcggcctgatagttcctcgcgtagtaggagacgttcgagtcgaggtcaagcatgtcctccgtggacatactggacgcgtcggcctcggcgtcgaaagacgtccataccgcgagcatccgaaccccgctgcactcgagaaacgccttgtacatggctgcttccagacccgcgtctgcacctaggccgacggcgacgaggggaagttggttgccactaccgaccatcatgcatgccacggtgaaatgcttgagcccgggagtcggaagccagtagaaacgcagttcgtggcttcggcccgctgcacgttccacgagccgctggatgcgctggaggcggggtccttcgacgcggatgcgcacaggtgacgaggctccataccacaggcccatcgcggcatctacctggatcaattcataagccgcggacagcgttgcggcgacgcgtgaagtgtggacggcggtgccggtcgtcacggccgttcccagccacggctcaccgtcgtgccgacgggggttgtaacccaggtaaaagaactgcgccgggatccactcctgccgggaggtcccgacacggggagtcttgacccatgtcatgggcaagtcgtcgcgataggtgtcgaacgcacctccagccactcgttgcgcgaagccgaatgcgcccagatcgagaacttcgtcctcggtccgggcgaggagttcctgacgagtcgcccagcgccgttcgaagggactatggagaatcccggtacccgcgcagtagcgctcgacggcctccgcgtagaccttgatctctgcctcaaactcgttcagccccaccccaccgatgtggtagctacccggcttggggtcgggccggtcaagcagtgcgtgcatccccgtgagttccccaccgttcacccgcacgcgggggccgagcgcggggtgcagcgagtagccgacggaagtcaccagcccgcatagcgggctgtaggtgcgccgcctgagccgggctgcggtctcgacggggtcgctatcctggcgaagcttcatcgctcgccccctgccgccagccactcacggatgtcgtagtacaggtccggagcggtttcaacctgcgctggtgcatcaaaacgggacataggtaggacgtcgttgtaggcgatctccatcgtcggtatgtagaccgacaacactttgttgcgcgtcgtgttgaggccgttgcgggcgatgctgacagcctcatgcgcgacgtgcgcggccaagatcgcgcgcaccgacgctgccacggccggcgctccggcccttacgcggtcggcagcggccacccgcatccaggacaggtagctctgccgttcgcgcaggttcatcgcgacccgctgctcgaaggtccggtaggacgaggtcgcaccagggacgacgtagggacccacgtacaaggccggcccgtctacagctgcgtggagccacgacaggtgggcgcgtcgggcgaacaggtcaagggcgcgcagcatagccgggttgttctgcgccagcgctaccacaaggagtggctgcaggtccggcgccgaacccagcaacgccaacatctgggaggcctcctgctccatgtgcaactcgtcggccgactgctcaagccgcaggcctgcgaagagggtggctgatggctgcgtgtcgtcagcgaggacggtagcctgcagcccctctccctcgagaatctgctggatatcgccggcgaggagcgcgtcgtcgctgaatacccacaccgggcgcgtctctctacctccatccatcttgtcctcaacgttttcgaccagcgcaccgatcgatgctaggtgggccatcacgtcgtcaagggccgcgcgggtcaatccgggcacccgggacacgatctcgggcggctgcagtccttggctcaacaagtccaaggccggccacagggtcccggtggcgtcgtcgtcctccagcgttgtgctctcggcgttccagacgcctcgacggaactccaccctgtccatcgagtaaggcaccatcatgaggcccggtgaaatgtggttggtcactttggctcctgtacagcctaggcttggacgcccacggtcatggtgtgggtcgcggtttggaaaatcccgtcgaggttgagtgcctgattgagttcgtcctcgtagaagcttgaggactcgactgaggcaagaccgagccccgtgcagaccaagttgatctgttgtgcgatcgccccgacttcttgaagggcgaacctcaaacccctggctccgtacttccgcatcgccctccacggcgagatgacgaacaccaagtgcactccggccgcatccgattgctccacggccggctcgccggccatcgaattcctcacgccgcgacagccctcttcaccggtcacgggcaccagtcgatcgatgaccggcgagtagcggtagacgccgcgactcaagccggacacccgttgtgcggacatgaagatagacacgggatacagccctccaccagacgggacagcgcgtacattataccgcacgatatcaccgctcgaacgtgggacatccacgtgccccgtcacaccggcagcacctctcagaaacgcagctacgtcacgcaggtctagggattcgccggtgtagttccgtccgctgcgccggcgggcgatcacttgctcgaggggtgcgcgcaccctgctggacctgggaagttcgatcacatcggcagcgaacgtgtcgcgatccatctgtccgtacgtaacgatcatggggtcaacgaaatagtcgccgaccgagacgttgaactccatatccccccgggcgatgcgcgaggcgagcaagaagtctgcagctgcgttagacagccccggcccatcagtgttgtcgcagcggaactcgtgggtccgaaaccccacaccttccgtgcccgggctctgcgctcgatacgacgtgatcgcagaactagccttccttaaaccgcccggagtagctaccatgaccgtcccctctgaggtctcccgaacacttgcgacaatagcagcatgtgggggcagccgccagaggcgggcatccttgtctcgacaaccattgacctccggattcgatatgtgcataatcatagtcgtgccaacacgaaacgtgtacgtctcggaagacgacctagacctgttcgccgaagccaccgagatcgctggaggcctgtccgcagcggtgttggaggccttgcgcagctacgtagacaggcaccatcgcgcggccggcggattcgacgagatcgagctggagctgcagaacgacggtatcgaccaccgtgtcaccttcatgggtcgccgcctgatacacatccgccgtccagatcccgagggaacccgcatagacactgtctacttgaccgccaaacaccaattcgccgttgccaccaaaatccaacgacggctgccagactggacggccggccacgagcacatctggtccgacccggagacctggaatcgggagttctggatcgcaggtgacaagacgatggccgtgtatcccagccttgacaaactccgcgaagctgaccccaatgtggccgaacgcgccgaggccgcggtcaaaatcccgccgttcgaggtcctggacatctgatgacagaatcatcatcttcccggcggcaattggcaatgccggtgctgtcagtcacggatctagccaagaaatacgtggttcatggcggctacgaggtcccggcactcaacggtgtctcgtttgacctgcacccgggagagatgctgggtttgttcgggccaaacggtgctggaaagacgacgctggtcaggatcatcgcgggcctcttatcggcagattctggagacgtccactggggatcggatcaaggtcgggccaggttaggctacgtgtcccaaaagggtggactgcagtacgggctcacgtgccgggaagagatggtcttccacgcacaatgcttcggccagtccgccaagcaggcccggactagcgtcgacgaggtcgccgcgatgctgcactgcgattacctgatggagtgggacgtcggaaggctctccggtgggcaacgccgaatcatcgaggtagggctagcactcgtcaatcaaccatcggtcgtcctgctcgacgagcccaccctgggcctggaccccgcaacacgcctgtcgttgtggcaaacggtaaagtcggcacgccgtgagaccggtgctgccttcctcgtcaccacccactacattgacgaggtggccgagcacctgtccaacgtcagcgtgatcaaccacggaaccgtcgtcgccaacggctcgcccgcgcacatccgagaaatgttcgcgaccggggaagtaacgctcggcgtggccgaggatacggtggacagtgcggtggacgtgttggctgggaccgcgttcgaggcgcaccccaccgaaaccgtcccggggatcgtggtcaggtccaggcatcccgacgtggacgcggccaagatcatcaccatcctggctggtcatggcatctcggtggactccatatccgtacgcgaggcgaccttggaagaggcgtttctcacgatcacaggcagtcgagacccggagaggcaaatcccatgaacacttgcttcaggcgatatgcggcgatgtcgctgagagcgcggcgtgatttggccctgacattcatccagcccctcgtctacctagccctcttcggaccgctcttcgtcacgacgatgaagatgtcgcagagagctaccgccgctacgggttactccctatacatcacgggcctgtccatccaaatggccatgacgatcggtgccttcgcggggctaaccatcatcctcgaataccgactcggcatcctcgaacggatctggagcacccccctcacggggagcaagatgatggcggggcgaatcgcgcgcgacgtcgttatgatgatgatgccgatactggtcgtcttcatcatcggcctggtgctgggaacacgccccagcccactgggcctggcgacctacttcgtgacagtgctcggcacaggagccacgttcgccggggtctcctacgcggtggcactcagaacgaagagcgaggcagcgctatccgcgatcttcaacctcatcctgctacccatcctcctgctgtcggggatcatgctgcccatgtcgttcgcaccacactggatcgccaccgctgcccacgtgaacccgttgtggtacctggtgcaaggcgcgcggaaccagttcagcgttctagggctcgtggcggcggccccatggagttgggctgtggccatcgtcatgtcagccgctgccttcggctgggcaagccacgaattcaacaagaggcgctgacacaaagaatggtgccgggaacccaggtccccggcaccaccgagtgcactcgcgacgtcaacgcaccgttgcggtcactgcgcaggtcgagcacgaggacgacgagcccgcgctgctgcaggtcgagccgccaggcgcgagcaggtcgacgttagcgtcggcgccgccgaagacggacgtgacggccggctgagaggtgcggatgcggtgctccagcgaggaggtggtggtgagtttcatgggaggtgctcctaggagtgagacgagaacaaaccctagcgataggttagcagtccgcaaccgactccgggaatagtagaagcgcgcatccgtagcggaagaccttagcctgattacagtgaccctgttcgcgtctcaacattattccacacccccgagcagcgaacgacaccgcgatgatgatccgtcgcctctccaccgaagaactccgcgcccacatcgcaccgggccgccgtcccgtgcatcagacctgccgtcaacgtcggccatgaagctgggaaggtggctctcgtctaggagcagacgcgggacgcctcctccaggttgggccggggaagtgtccggttcttgatgtaggtggcggtccctattgatgggcgttgaccgtgggaatgcggtcggcgaagggggtggcgaacccgttgagcgcaggcttccagcgcatgcatcaacgctgtctgccggccaccggcaagcctcacccgcccgtcatggccatcatcgaggtgccggtgaatcctcgacacatgatcccaactcccccggaggggcttccggggctgttcagccaccagatcagccaggcggcgagcccgactctgccacccggaccctgcagagcgtgcctgctgccgtcgtgtcgtgtcgggccagtgggccaccagatcggccacatccgtcttggcccatct

SEQ ID NO: 111 - DNA, 16494 bp, Propionibacterium acnes
gtgttccagtgcctcgcgggcgtgatgttcttcttcggcaccttcttgccacatgcttcgcgcttcagcctcgccatccaagcgaacctggactgtgaacgagtcctcatcgggtccgtcctcattccacgcggcaatgatcccacgggcctcgtctgcgacctgactcaacttcatcgcctgcccgacagccccgagagccggaatctcgaacacccagatattcgcctcagccgagacctcacgatgggcgatcacttcgtaggtcgtctcaccttctactgtcgtgtccattacttccactccttcggaattttcacgcctgctcgctccagctgtgccaggacaccaactgacgtcagctggtgtcctgctggtatcgatacgcgcccggctccgccggggcgtccccagatttcatggcttcccttggcgttccgcagacgggcccatccttgagaacggagcagcttgaggacgtccttagttttctgcggtttcacacatcatagtatagccccacttaacttgtaaactaagcccctgtttacattttagttggtgcatgtgatccctgctcttatgacgtcgcccgacctggcgccttagacatgcactgttcatcctcaaccacactcaccgtcacgggtccgaaggcgaggtctatcaccattcgcatcgatgaagttgaagcaggatcgtccgcatcacgcactgccgatccggacagacgccaccggccgtaccgactgtttacgatctgccaccgcagactgctgccataaccgctatcacctctgatagtacgtttagtactatcagaggtgattcaagattctcctgtcgagcagccctacagtcacgaagtcctgcgatcgtcatcgcttaaggcagacggatggccatcggggaccactcgcaaagcaggggcgatcagcaacagtgatgtgccatgagcaagtactggtgcaccggctgtttactccgcccctagataaaccacgggtgcaggggtggacaccacaccatgaccgatgtggtgcccaccccatggctcacaggcaggccctatcgccgggagcactgctgcagatgaggctcagtaacctgccatgtctcacctggggccaaggtgccaagctccccacggaatctcaggcatcggaaaccagcagccgaacttccacagcatgagcgccctacgaaaaagcaggccgccgacggttctcaagaactcgccggcggcctgcatcgccactcgaactgtaaccgtggtccgaccccgtgcacaggtaagctccacactcccaccaggcatggccgaggcagtaccaagttgccgtggcccatcggcagatttggttaaattttgaaaagtcatatagactccttctgtaaatttttaaatctcataggactctcgccatcgccagccagcttcgacaggagtcccgatgtttcaccgagtgaaatatcggcaccgtttgagttgacctaaagctcaaaagatgctagaatccatcttacctcgttaggggcgttttgtcaaacgcccctatattgcgtgtcttcgcgcgtcgtagcgctgatgctgcgcctgtgtcgactatccgtttgtaagtactttcgatgacaccagcagtggctactcatgactggtgcgtgcgggtctaaagcagcagggaaaggaatcgcagtagaagccgcttgattcctatcacccctgatggtactatcagtactaacagagcagggcttactcgatgcgtgagaatcggggacatgctgagcctctcgtaggtcattggcctgctgggcgtcagtgtggcgcggttcgatccagtgaactctatcagctctgttagtactgtcagagttgatatattcgaccccaggaggagcccatgagttacatcgttcgcaccggaaatttggtcgacacccccgagctgcgtgagggagagcatggcccgtacacctacgctcgcgtcatcgtgtccgatcgcattcgccaggaggacggcagctacgtcaacgggccagcgatcgcctacgacgtcttggcgggtggcagccaagccgtgaatctggttgaagccgccaaggcgagcggcaacatccgcatcatgttcgcgggccgttaccgcgtcaccgagtggcggggtgagcagggcactcgtatccagcatgaggtccgagccgacgaagtgagcgtgagcctgctcggtcagagggtgaccgtggagcggcctcgaggtgacgtggcatccaaggagagcacgtcgttctgattgagtccgggggcacggtggtcgccgtggtaaaccgtgcccctgacagtactattgacactattggaggtatcagtgtgactgctcaaattttcgccttgtgcaaccagaagggtggcgtcggaaagtcgacatcgacgtttcatctggcccgtgccgcggtgttgcgtggccagcgtgtgcttgtcgtcgacaacgacccccagggcaacctgacgtctgtcgcggccgccgagcccgtgggggaggatcaggcggggctggccgatgtgctcagcgcgcgtgctccagagaccctccgcgatgtgatcgtgccgggaatctggtctggcctcgatgtcgtgccgacgtctggcatcacgctcggctgggtgcgtgacgaactcgtgatcgccggtgccggccgagaaggccggctgcgggaggccctggccggcgtcgaggacgactacgacgtgatcctgatcgactgtgctccatcgctcgatcagctcacgatcaacggcctggtggccgcccagggtgtcatcgtcgtgacgcactcgaagttgtggagcgccaacggcctcgcccagctgctcgacaccatcgacagcgtgcgcagctactacaacggcgcgctgcgcgtggcgggcatcatcgtcaaccagcacgaggagaacaccatcagcgggaaaacctggctcgacgagctgcatcaggctgccgagtcccggaagctgaccgtgcttgacccgccgatccccaagcgtgtcgtcatcgccgataccgtcgaggccgcgcgcggtctcgacgagtggggaagtgccgaggcggccgcgctcggccagttgtacgcccaccacctgacctgcatcgaaggagccctgtgatgacccgtccagccccccgaaagtcctcattgagcggatcaactccggtcgccccgccggctcagacggcgccggcaccgtctgccgcacctaccccccacaaggccgatgagtcacagacgagcagcaccacgaggaagtggcggcacaaggtgtcgttctaccaggacccggccgacaccgaccgggtgcgcggggcgatcctttacacgatgacgaccgagggcaaccggaacctgagccagttcgtcaacgatgccgtcatggccaaggtggtcgagctggaagtcaagtacaacgatggccagccattccccgctgtgggagcccgaggactaccccagggcggtgcagccgccgccggtgagtagaggaccatcgaccgtcgggggcttcaccatgcccccgaccctcggtcatcctgatcctcttgtcgatggtggtgacagtgggggattcacgcctcgttcagatcagaggaagtctcaccgcgtgattagtactatcaaatctgacagtactaacagagcagatagggttccctaggtcgagctgtatcacgccgacaaccagtgagccagtgatctacgaggggcgcaatatgcacccgatcggtagccgcgaaggcctcgccctgccccgatagtactatcaccactatcaatggtgctagtggtgagtttcttccattgatgacaacagcacagtgctgccgtctgtgtgcgggccaccagcccgcacacagttgccgtcgaggacgttgttcatgctctgtggtggccggtcctgagggcggctcgcaggatctcccggcgctcacggcgacgagcctggtagccaaggtctgcatgttcggcggcgagacgggctttgagggttgcggcttctgcacggcggtggagttggtcgtcgatgagttgggcgcgggccagacgccgcttatgggggttgtcgtgggtgaggggggcgtcgaggctgccgtcgtgggttagggccagggctgctcgttcggcgtcgtcgaggccgatgtggtggacggtcacgggtgcggtggtgacgtcgaggatgtccaggtggatgttgtggccgccgccgggggcttcggggaagtctggtgggctggcctggccggtgtcggggtcataccaggacaggccgatgatctcggcccagggtgggggcgggcagacggctcgcagaagggtgtgggccaggaacgtgttgcgggccatgatgcctccaagggtgaaaagcagtcgagtagcgatgacggcggggtagccgtctgctgggctgaggccgaccgggcccatgtcctcgatgctcttgtgctgcggccataccccaaagctaccaaacagtctttttaatctcaaagatacaaacagtgcttgacatattatctgcagcgaaagatactttcatcatggtggctgatcatgattacgcgactcctgacgatgagtggatgacacctcctcaggtggcccgtgtgattccgaacaccactgctcaggctgtccggcgctgggctgaggagggtcagcttcctggggcgtttcgtactccttctgggcgttggcatattccgtggtcggctgtggtgggcatcatggggtttgatccgcgtgagtccgcatcaccgagtgatcgtcaccagagctgacagagtcgtcgatgagctttcgagtgcagagctgatggcacgacggtctggatacttgtggagatgagagacgaccacatccagtcatggtcggggtacaccgaggggcagattcagcagtgctggcacgatgaggttgcccctgccattgactcgctcatggagcaggtaaggtctgttgccgagactcctgtgccgccgggttcgagattttacggcgatgagcagtgggccaagccttttcatccgtctactgcgatctgcggttcaatgggtccgccagcgatcacttgcacgcgctgaagctcctcgtctgggaagcgaacgtccaccatgtctatgcgccgtacacccttgctcgtgcatctattgaggcatcgtctactgctgtgtggctgttgagcacgaagacgcgcggagaacgtgtgctgcgagccttgcgatggtacgcgcaggattgtcacgactcgtgcaggttcatggatgatgagcagtatcgtgaccacctattgcggcgcattgaggggactgtcgctgcgggaaatctcgactcgcgcgctgctaggaaacggtaccgtgcaaccgatgttgtcgatgaggctgatcagctggttcccggaactctgagggcgtggcgagctttttctggtatggcccattcccgtatgtgggcatccagggggctgctcgacatggaagtgctgtccagtggccaaggaatggttacggcgaaggtgacgagcggatcggcccaaatcctttgggccgtcgtggcagctctgaatgttgctctcagtgccgctcgcttgtggcgtgattcgatgtgctcaccgtttgctgttgcccagtcggtagacgcgatgccagaggcgtttcgccgccctgtttagggtctgatcggggtagtgggtgttcacggggtcccaggttggccatggggcggcttggtgatgtgagttgggttgtgtggcagcctgggtgttgggtgtggcttcgttggccacgaaggcatgctcttccttgtgctgggacttgagtccccagtgctctcccctttgctagtggggggtggggtccccggaggtaggtcctccggggactttttctatgtctgtccgtgccccaggatttcgtatctaggcagtaccaattttgggttagttggaggtttctttggtaatggacagggtgagggtgatgaagaggtggccgtccttggtggcagaaattttctcgaacttcagctgaatgttgttatcagccactatctgttgggcggtgaggtgctcggagagcttctggaatccttcgcggatccacaggttgtaggggttggtgaccgagaccgaagggtatgggtcgaccttcagcgtcaggactggctggtctgggttgagggagttgatcttcaccagtttggggtaccggtcgcactcatgtgtctcttgtgttgggggccagcagtcgggggcccattcctcccagtggtcacgcatctcacgaagtactttcctgcatctcagcctctgcaggagctcgcgcgccaccgatgggagggctgccatgatgagggcaaggactgcgaacccgatgatgtaattgaccgtgtccctcgtcacgccgttcttgccgaggattccgatggcgaacgcgatgacgacaccgcccaggcacaggtgcatggggtcatgctgtgatggtttttcttcttcagcgactggtggggctatagtcatgtgtgccccttagtactaagtgatactggtgggttgcttttccccggtggccgtgtgcaagacggccaccggggttttccttcatgttcctgattttatctgcccggtgtggcgttttcatctttgtgtgggtggttcgcctggggtcttggagtgtggtgacgcggtgatggtcacggtgacggtgactgtggcgcgtggcgggtgaggtggttctttcctggtctggtgtgtggcccaggtgagtgtggtgatgagggccagggtgaggatgatgaccagggtggggagtagtttgtctggccggtgtcgccgggcttggtggcgcggcatgtttttccagggtgtgtctccgaacaggtcgtcgtcggaggggtcgtcgtggttcatagggtggccttggcgatggtggtgggcgagtttggtccaggtgatggtgccgtcggaggcgatgtggcggtcggcgggcagggtgtggacggtccatccggcgtcggtgagggcggtggtgaaggatttcttgatggatcgtttgggtaggtcgatgggggcgtgggtgccgacccagatgcaccggtttttgaggtgggtggcgccgaggtggttcatgtcgcggaccatgttttgggtgagtgtgagggtgtcggggtcccattggacggggatgatgatgtggtctgcgatggtgatggcgtgttgccaggcggcgtcgaggtcgttgtttccggtgtcgaggatgatgacgtggaagcggcttcttagggcggtgatgatgcggtcgaggtcgtcggcggtggggggtgtgatgaggctgttgtggttgtcggtgatggtgggtaggcatgtgatggtggcccagccttctggttgccaggagatgtaggggccgaggtcgcggggttgggaggcgaatcctgggtgacgggctgcgcgggcgaggtcgatgacggtgttgtcggtgtggcggggggcgcgggtggagagggtgccgcgtgggttgatttccacgacgacgatgtcgtcgtgtcctgctgtggtggcgagggcttgggcaaggatgacggccagcggggttttgccggtgccgcctttgaggttggcgagggtgatgatgtggtcggtgagttgggcgggtgcggcggtgtggtgagggttggcggtgaggttggcgatggtgaacagggcatcgagatcgtcggtggtgttctgctcggtgggttgggggtcgccggagatgatcgggtcggcgcggcgcggctgccatgccggcctcaccactgtcacgaccaccacgggtctgctggcgctgtgtgggtgtcgtcggcgatgactcacgatcggcagtctcaccatcgtctcggtgatgctcggctagcgctggacccggtcaagttcgggccggctcacccagtggtgatgactcggtcacagaaccgctgccggtcgttatctcggacgtctcgactcctccagtcctgatgggcgttggagccacctacacctactctcagaacgaccccgacctcgtgtggggcgggggcagatgtcacttgggccaatcgagagcccaggtgatggggaaagcaggggtgtgatatctgtcctggaaaactgggcagctgctaccgtggattgacggatctccacgaaagaagggaatgcgaccatgcagatcaccgtcaagaccatcaaagatcatcgggttcgcactgtccagaccgccatgagcagcgccttggggattggttcccaggtagacatgctcgcccccggcggttccaccagctcgagttccggttcatgctgctcgtgctcgacctgcgcggtagtggcgcagcctcaagactgaacggctggtcagccccaggggcgtggcgctcatcgcgtcacgccccttctattcgctggacagggtgcgcgagctgaggaacatcgcggtgtgtgcgatgacgaggggcaggagcaagtctgtgcgggttgccaagtagccctgcgcgatggccatcacgctggccccgacggcggcgaagacacctccgatacgtcgcttcatgccgccgaattgcatcaggacgaataggactcccgcggtccacatccctccgggcatgcatctgggaaagatgaaccggaagatgatctcttcacaggagagctggagtactagcagcgtagcccccacggggagactcacctctactgacagacggatcgtcttcatccacccacccgagctggcatcgaccatttcggtggccatgcgcgaccggtggcctcgtgcctctcgctgcgtgtcgatccagccgagcagtccgtggacgctctccgctaggactcctgacgcgacagtctcaccaattcctaagcccacggcgaggaccgcgacgcccccctgcacggcaggctgtgtgacttggtggtcccaccaacccgccggcaggaccatgcgtgcgaggctgcacacgagcaggaggtggagggtcacgacgagcgacatctggaataccgcttgccgttcggcgatggtggcgttgggaaagagcggtaggccggcacgggcagcggcgctcgacagcttccgcaagagcggtttggagacgaagtagtaggcgacgtacagcgccagcgctgtcgcgatgatgatcatcggtctgccaccgagctgacccgccgatagccgtttctgttccaccaatactggctgttgtagatcaggtggcccagaacacaggcccagatcccccagaagatgaacaggatagtccccaaggcggcgagcgggatcttggagaggacctgtccccgtccgaacaccgagtggccgcaagcaaacaagagtgctcccacagcggtgagcgcgagccaggccggggttgctcgcagactgatcaccgggaccccgacccggaagccgacctcttctcctacagcgatgactagcaactgccacagcggcatgttctgaacggagcgcgcgactcgggctcgagtcacccacacgggctgttgagcgctcacatcaccactcaggtaccccggtgaggcacttcgcttagtactggggcccgatgtgcgagcattcgtgatgtgtcgcaggatccggttgtcaagccaagaggccagcagggctccggcgacagtgacgggtagcccgatcagcacgaggccccagccatgcggtgccgagaggtttctggccggcgtgcacgcgaggcaggcaaatgccatcactgccagcactacgacgtagatggtcgcataattcgacttgcgggtgacgttgccgaccatcttggccaaagtcgctggggaccagctgatgagtgcgatggtggtcagcaggaagcaggaccagacagacatccggcgcactcaggggtatgggtgcggctgtgggttttggaaaccgccatatgcggcgtagcgggggtgtgcccgcatgggtgcgctgggcagtgacagggcgagcagcccaggcgcccagagcctgacacagtgcagtcccagcccctggatctctatggtggtgaaatcttcgatgtacaggggtgacacacaggtgatgctgttgaccacgctctttaccagttccgcccccgtgtgggtgtcgtcaggtggcaggtcttcggcttgggcaatggtgcccgcgtcgaatttcgccacaactgattgcgcggcctgatagttcctcgcgtagtaggagacgttcgagtcgaggtcaagcatgtcctccgtggacatactggacgcgtcggcctcggcgtcgaaagacgtccataccgcgagcatccgaaccccgctgcactcgagaaacgccttgtacatggctgcttccagacccgcgtctgcacctaggccgacggcgacgaggggaagttggttgccactaccgaccatcatgcatgccacggtgaaatgcttgagcccgggagtcggaagccagtagaaacgcagttcgtggcttcggcccgctgcacgttccacgagccgctggatgcgctggaggcggggtccttcgacgcggatgcgcacaggtgacgaggctccataccacaggcccatcgcggcatctacctggatcaattcataagccgcggacagcgttgcggcgacgcgtgaagtgtggacggcggtgccggtcgtcacggccgttcccagccacggctcaccgtcgtgccgacgggggttgtaacccaggtaaaagaactgcgccgggatccactcctgccgggaggtcccgacacggggagtcttgacccatgtcatgggcaagtcgtcgcgataggtgtcgaacgcacctccagccactcgttgcgcgaagccgaatgcgcccagatcgagaacttcgtcctcggtccgggcgaggagttcctgacgagtcgcccagcgccgttcgaagggactatggagaatcccggtacccgcgcagtagcgctcgacggcctccgcgtagaccttgatctctgcctcaaactcgttcagccccaccccaccgatgtggtagctacccggcttggggtcgggccggtcaagcagtgcgtgcatccccgtgagttccccaccgttcacccgcacgcgggggccgagcgcggggtgcagcgagtagccgacggaagtcaccagcccgcatagcgggctgtaggtgcgccgcctgagccgggctgcggtctcgacggggtcgctatcctggcgaagcttcatcgctcgccccctgccgccagccactcacggatgtcgtagtacaggtccggagcggtttcaacctgcgctggtgcatcaaaacgggacataggtaggacgtcgttgtaggcgatctccatcgtcggtatgtagaccgacaacactttgttgcgcgtcgtgttgaggccgttgcgggcgatgctgacagcctcatgcgcgacgtgcgcggccaagatcgcgcgcaccgacgctgccacggccggcgctccggcccttacgcggtcggcagcggccacccgcatccaggacaggtagctctgccgttcgcgcaggttcatcgcgacccgctgctcgaaggtccggtaggacgaggtcgcaccagggacgacgtagggacccacgtacaaggccggcccgtctacagctgcgtggagccacgacaggtgggcgcgtcgggcgaacaggtcaagggcgcgcagcatagccgggttgttctgcgccagcgctaccacaaggagtggctgcaggtccggcgccgaacccagcaacgccaacatctgggaggcctcctgctccatgtgcaactcgtcggccgactgctcaagccgcaggcctgcgaagagggtggctgatggctgcgtgtcgtcagcgaggacggtagcctgcagcccctctccctcgagaatctgctggatatcgccggcgaggagcgcgtcgtcgctgaatacccacaccgggcgcgtctctctacctccatccatcttgtcctcaacgttttcgaccagcgcaccgatcgatgctaggtgggccatcacgtcgtcaagggccgcgcgggtcaatccgggcacccgggacacgatctcgggcggctgcagtccttggctcaacaagtccaaggccggccacagggtcccggtggcgtcgtcgtcctccagcgttgtgctctcggcgttccagacgcctcgacggaactccaccctgtccatcgagtaaggcaccatcatgaggcccggtgaaatgtggttggtcactttggctcctgtacagcctaggcttggacgcccacggtcatggtgtgggtcgcggtttggaaaatcccgtcgaggttgagtgcctgattgagttcgtcctcgtagaagcttgaggactcgactgaggcaagaccgagccccgtgcagaccaagttgatctgttgtgcgatcgccccgacttcttgaagggcgaacctcaaacccctggctccgtacttccgcatcgccctccacggcgagatgacgaacaccaagtgcactccggccgcatccgattgctccacggccggctcgccggccatcgaattcctcacgccgcgacagccctcttcaccggtcacgggcaccagtcgatcgatgaccggcgagtagcggtagacgccgcgactcaagccggacacccgttgtgcggacatgaagatagacacgggatacagccctccaccagacgggacagcgcgtacattataccgcacgatatcaccgctcgaacgtgggacatccacgtgccccgtcacaccggcagcacctctcagaaacgcagctacgtcacgcaggtctagggattcgccggtgtagttccgtccgctgcgccggcgggcgatcacttgctcgaggggtgcgcgcaccctgctggacctgggaagttcgatcacatcggcagcgaacgtgtcgcgatccatctgtccgtacgtaacgatcatggggtcaacgaaatagtcgccgaccgagacgttgaactccatatccccccgggcgatgcgcgaggcgagcaagaagtctgcagctgcgttagacagccccggcccatcagtgttgtcgcagcggaactcgtgggtccgaaaccccacaccttccgtgcccgggctctgcgctcgatacgacgtgatcgcagaactagccttccttaaaccgcccggagtagctaccatgaccgtcccctctgaggtctcccgaacacttgcgacaatagcagcatgtgggggcagccgccagaggcgggcatccttgtctcgacaaccattgacctccggattcgatatgtgcataatcatagtcgtgccaacacgaaacgtgtacgtctcggaagacgacctagacctgttcgccgaagccaccgagatcgctggaggcctgtccgcagcggtgttggaggccttgcgcagctacgtagacaggcaccatcgcgcggccggcggattcgacgagatcgagctggagctgcagaacgacggtatcgaccaccgtgtcaccttcatgggtcgccgcctgatacacatccgccgtccagatcccgagggaacccgcatagacactgtctacttgaccgccaaacaccaattcgccgttgccaccaaaatccaacgacggctgccagactggacggccggccacgagcacatctggtccgacccggagacctggaatcgggagttctggatcgcaggtgacaagacgatggccgtgtatcccagccttgacaaactccgcgaagctgaccccaatgtggccgaacgcgccgaggccgcggtcaaaatcccgccgttcgaggtcctggacatctgatgacagaatcatcatcttcccggcggcaattggcaatgccggtgctgtcagtcacggatctagccaagaaatacgtggttcatggcggctacgaggtcccggcactcaacggtgtctcgtttgacctgcacccgggagagatgctgggtttgttcgggccaaacggtgctggaaagacgacgctggtcaggatcatcgcgggcctcttatcggcagattctggagacgtccactggggatcggatcaaggtcgggccaggttaggctacgtgtcccaaaagggtggactgcagtacgggctcacgtgccgggaagagatggtcttccacgcacaatgcttcggccagtccgccaagcaggcccggactagcgtcgacgaggtcgccgcgatgctgcactgcgattacctgatggagtgggacgtcggaaggctctccggtgggcaacgccgaatcatcgaggtagggctagcactcgtcaatcaaccatcggtcgtcctgctcgacgagcccaccctgggcctggaccccgcaacacgcctgtcgttgtggcaaacggtaaagtcggcacgccgtgagaccggtgctgccttcctcgtcaccacccactacattgacgaggtggccgagcacctgtccaacgtcagcgtgatcaaccacggaaccgtcgtcgccaacggctcgccagcgcacatccgagaaatgttcgcgaccggggaagtaacgctcggcgtggccgaggatacggtggacagtgcggtggacgtgttggctgggaccgcgttcgaggcgcaccccaccgaaaccgtcccggggatcgtggtcaggtccaggcatcccgacgtggacgcggccaagatcatcaccatcctggctggtcatggcatctcggtggactccatatccgtacgcgaggcgaccttggaagaggcgtttctcacgatcacaggcagtcgagacccggagaggcaaatcccatgaacacttgcttcaggcgatatgcggcgatgtcgctgagagcgcggcgtgatttggccctgacattcatccagcccctcgtctacctagccctcttcggaccgctcttcgtcacgacgatgaagatgtcgcagagagctaccgccgctacgggttactccctatacatcacgggcctgtccatccaaatggccatgacgatcggtgccttcgcggggctaaccatcatcctcgaataccgactcggcatcctcgaacggatctggagcacccccctcacggggagcaagatgatggcggggcgaatcgcgcgcgacgtcgttatgatgatgatgccgatactggtcgtcttcatcatcggcctggtgctgggaacacgccccagcccactgggcctggcgacctacttcgtgacagtgctcggcacaggagccacgttcgccggggtctcctacgcggtggcactcagaacgaagagcgaggcagcgctatccgcgatcttcaacctcatcctgctacccatcctcctgctgtcggggatcatgctgcccatgtcgttcgcaccacactggatcgccaccgctgcccacgtgaacccgttgtggtacctggtgcaaggcgcgcggaaccagttcagcgttctagggctcgtggcggcggccccatggagttgggctgtggccatcgtcatgtcagccgctgccttcggctgggcaagccacgaattcaacaagaggcgctgacacaaagaatggtgccgggaacccaggtccccggcaccaccgagtgcactcgcgacgtcaacgcaccgttgcggtcactgcgcaggtcgagcacgaggacgacgagcccgcgctgctgcaggtcgagccgccaggcgcgagcaggtcgacgttagcgtcggcgccgccgaagacggacgtgacggccggctgagaggtgcggatgcggtgctccagcgaggaggtggtggtgagtttcatgggaggtgctcctaggagtgagacgagaacaaaccctagcgataggttagcagtccgcaaccgactccgggaatagtagaagcgcgcatccgtagcggaagaccttagcctgattacagtgaccctgttcgcgtctcaacattattccacacccccgagcagcgaacgacaccgcgatgatgatccgtcgcctctccaccgaagaactccgcgcccacatcgcaccgggccgccgtcccgtgcatcagacctgccgtcaacgtcggccatgaagctgggaaggtggctctcgtctaggagcagacgcgggacgcctcctccaggttgggccggggaagtgtccggttcttgatgtaggtggcggtccctattgatgggcgttgaccgtgggaatgcggtcggcgaagggggtggcgaacccgttgagcgcaggcttccagcgcatgcatcaacgctgtctgccggccaccggcaagcctcacccgcccgtcatggccatcatcgaggtgccggtgaatcctcgacacatgatcccaactcccccggaggggcttccggggctgttcagccaccagatcagccaggcggcgagcccgactctgccacccggaccctgcagagcgtgcctgctgccgtcgtgtcgtgtcgggccagtgggccaccagatcggccacatccgtcttggcccatct

SEQ ID NO: 112 - DNA, 16494 bp, Propionibacterium acnes
gtgttccagtgcctcgcgggcgtgatgttcttcttcggcaccttcttgccacatgcttcgcgcttcagcctcgccatccaagcgaacctggactgtgaacgagtcctcatcgggtccgtcctcattccacgcggcaatgatcccacgggcctcgtctgcgacctgactcaacttcatcgcctgcccgacagccccgagagccggaatctcgaacacccagatattcgcctcagccgagacctcacgatgggcgatcacttcgtaggtcgtctcaccttctactgtcgtgtccattacttccactccttcggaattttcacgcctgctcgctccagctgtgccaggacaccaactgacgtcagctggtgtcctgctggtatcgatacgcgcccggctccgccggggcgtccccagatttcatggcttcccttggcgttccgcagacgggcccatccttgagaacggagcagcttgaggacgtccttagttttctgcggtttcacacatcatagtatagccccacttaacttgtaaactaagcccctgtttacattttagttggtgcatgtgatccctgctcttatgacgtcgcccgacctggcgccttagacatgcactgttcatcctcaaccacactcaccgtcacgggtccgaaggcgaggtctatcaccattcgcatcgatgaagttgaagcaggatcgtccgcatcacgcactgccgatccggacagacgccaccggccgtaccgactgtttacgatctgccaccgcagactgctgccataaccgctatcacctctgatagtacgtttagtactatcagaggtgattcaagattctcctgtcgagcagccctacagtcacgaagtcctgcgatcgtcatcgcttaaggcagacggatggccatcggggaccactcgcaaagcaggggcgatcagcaacagtgatgtgccatgagcaagtactggtgcaccggctgtttactccgcccctagataaaccacgggtgcaggggtggacaccacaccatgaccgatgtggtgcccaccccatggctcacaggcaggccctatcgccgggagcactgctgcagatgaggctcagtaacctgccatgtctcacctggggccaaggtgccaagctccccacggaatctcaggcatcggaaaccagcagccgaacttccacagcatgagcgccctacgaaaaagcaggccgccgacggttctcaagaactcgccggcggcctgcatcgccactcgaactgtaaccgtggtccgaccccgtgcacaggtaagctccacactcccaccaggcatggccgaggcagtaccaagttgccgtggcccatcggcagatttggttaaattttgaaaagtcatatagactccttctgtaaatttttaaatctcataggactctcgccatcgccagccagcttcgacaggagtcccgatgtttcaccgagtgaaatatcggcaccgtttgagttgacctaaagctcaaaagatgctagaatccatcttacctcgttaggggcgttttgtcaaacgcccctatattgcgtgtcttcgcgcgtcgtagcgctgatgctgcgcctgtgtcgactatccgtttgtaagtactttcgatgacaccagcagtggctactcatgactggtgcgtgcgggtctaaagcagcagggaaaggaatcgcagtagaagccgcttgattcctatcacccctgatggtactatcagtactaacagagcagggcttactcgatgcgtgagaatcggggacatgctgagcctctcgtaggtcattggcctgctgggcgtcagtgtggcgcggttcgatccagtgaactctatcagctctgttagtactgtcagagttgatatattcgaccccaggaggagcccatgagttacatcgttcgcaccggaaatttggtcgacacccccgagctgcgtgagggagagcatggcccgtacacctacgctcgcgtcatcgtgtccgatcgcattcgccaggaggacggcagctacgtcaacgggccagcgatcgcctacgacgtcttggcgggtggcagccaagccgtgaatctggttgaagccgccaaggcgagcggcaacatccgcatcatgttcgcgggccgttaccgcgtcaccgagtggcggggtgagcagggcactcgtatccagcatgaggtccgagccgacgaagtgagcgtgagcctgctcggtcagagggtgaccgtggagcggcctcgaggtgacgtggcatccaaggagagcacgtcgttctgattgagtccgggggcacggtggtcgccgtggtaaaccgtgcccctgacagtactattgacactattggaggtatcagtgtgactgctcaaattttcgccttgtgcaaccagaagggtggcgtcggaaagtcgacatcgacgtttcatctggcccgtgccgcggtgttgcgtggccagcgtgtgcttgtcgtcgacaacgacccccagggcaacctgacgtctgtcgcggccgccgagcccgtgggggaggatcaggcggggctggccgatgtgctcagcgcgcgtgctccagagaccctccgcgatgtgatcgtgccgggaatctggtctggcctcgatgtcgtgccgacgtctggcatcacgctcggctgggtgcgtgacgaactcgtgatcgccggtgccggccgagaaggccggctgcgggaggccctggccggcgtcgaggacgactacgacgtgatcctgatcgactgtgctccatcgctcgatcagctcacgatcaacggcctggtggccgcccagggtgtcatcgtcgtgacgcactcgaagttgtggagcgccaacggcctcgcccagctgctcgacaccatcgacagcgtgcgcagctactacaacggcgcgctgcgcgtggcgggcatcatcgtcaaccagcacgaggagaacaccatcagcgggaaaacctggctcgacgagctgcatcaggctgccgagtcccggaagctgaccgtgcttgacccgccgatccccaagcgtgtcgtcatcgccgataccgtcgaggccgcgcgcggtctcgacgagtggggaagtgccgaggcggccgcgctcggccagttgtacgcccaccacctgacctgcatcgaaggagccctgtgatgacccgtccagccccccgaaagtcctcattgagcggatcaactccggtcgccccgccggctcagacggcgccggcaccgtctgccgcacctaccccccacaaggccgatgagtcacagacgagcagcaccacgaggaagtggcggcacaaggtgtcgttctaccaggacccggccgacaccgaccgggtgcgcggggcgatcctttacacgatgacgaccgagggcaaccggaacctgagccagttcgtcaacgatgccgtcatggccaaggtggtcgagctggaagtcaagtacaacgatggccagccattccccgctgtgggagcccgaggactaccccagggcggtgcagccgccgccggtgagtagaggaccatcgaccgtcgggggcttcaccatgcccccgaccctcggtcatcctgatcctcttgtcgatggtggtgacagtgggggattcacgcctcgttcagatcagaggaagtctcaccgcgtgattagtactatcaaatctgacagtactaacagagcagatagggttccctaggtcgagctgtatcacgccgacaaccagtgagccagtgatctacgaggggcgcaatatgcacccgatcggtagccgcgaaggcctcgccctgccccgatagtactatcaccactatcaatggtgctagtggtgagtttcttccattgatgacaacagcacagtgctgccgtctgtgtgcgggccaccagcccgcacacagttgccgtcgaggacgttgttcatgctctgtggtggccggtcctgagggcggctcgcaggatctcccggcgctcacggcgacgagcctggtagccaaggtctgcatgttcggcggcgagacgggctttgagggttgcggcttctgcacggcggtggagttggtcgtcgatgagttgggcgcgggccagacgccgcttatgggggttgtcgtgggtgaggggggcgtcgaggctgccgtcgtgggttagggccagggctgctcgttcggcgtcgtcgaggccgatgtggtggacggtcacgggtgcggtggtgacgtcgaggatgtccaggtggatgttgtggccgccgccgggggcttcggggaagtctggtgggctggcctggccggtgtcggggtcataccaggacaggccgatgatctcggcccagggtgggggcgggcagacggctcgcagaagggtgtgggccaggaacgtgttgcgggccatgatgcctccaagggtgaaaagcagtcgagtagcgatgacggcggggtagccgtctgctgggctgaggccgaccgggcccatgtcctcgatgctcttgtgctgcggccataccccaaagctaccaaacagtctttttaatctcaaagatacaaacagtgcttgacatattatctgcagcgaaagatactttcatcatggtggctgatcatgattacgcgactcctgacgatgagtggatgacacctcctcaggtggcccgtgtgattccgaacaccactgctcaggctgtccggcgctgggctgaggagggtcagcttcctggggcgtttcgtactccttctgggcgttggcatattccgtggtcggctgtggtgggcatcatggggtttgatccgcgtgagtccgcatcaccgagtgatcgtcaccagagctgacagagtcgtcgatgagctttcgagtgcagagctgatggcacgacggtctggatacttgtggagatgagagacgaccacatccagtcatggtcggggtacaccgaggggcagattcagcagtgctggcacgatgaggttgcccctgccattgactcgctcatggagcaggtaaggtctgttgccgagactcctgtgccgccgggttcgagattttacggcgatgagcagtgggccaagccttttcatccgtctactgcgatctgcggttcaatgggtccgccagcgatcacttgcacgcgctgaagctcctcgtctgggaagcgaacgtccaccatgtctatgcgccgtacacccttgctcgtgcatctattgaggcatcgtctactgctgtgtggctgttgagcacgaagacgcgcggagaacgtgtgctgcgagccttgcgatggtacgcgcaggattgtcacgactcgtgcaggttcatggatgatgagcagtatcgtgaccacctattgcggcgcattgaggggactgtcgctgcgggaaatctcgactcgcgcgctgctaggaaacggtaccgtgcaaccgatgttgtcgatgaggctgatcagctggttcccggaactctgagggcgtggcgagctttttctggtatggcccattcccgtatgtgggcatccagggggctgctcgacatggaagtgctgtccagtggccaaggaatggttacggcgaaggtgacgagcggatcggcccaaatcctttgggccgtcgtggcagctctgaatgttgctctcagtgccgctcgcttgtggcgtgattcgatgtgctcaccgtttgctgttgcccagtcggtagacgcgatgccagaggcgtttcgccgccctgtttagggtctgatcggggtagtgggtgttcacggggtcccaggttggccatggggcggcttggtgatgtgagttgggttgtgtggcagcctgggtgttgggtgtggcttcgttggccacgaaggcatgctcttccttgtgctgggacttgagtccccagtgctctcccctttgctagtggggggtggggtccccggaggtaggtcctccggggactttttctatgtctgtccgtgccccaggatttcgtatctaggcagtaccaattttgggttagttggaggtttctttggtaatggacagggtgagggtgatgaagaggtggccgtccttggtggcagaaattttctcgaacttcagctgaatgttgttatcagccactatctgttgggcggtgaggtgctcggagagcttctggaatccttcgcggatccacaggttgtaggggttggtgaccgagaccgaagggtatgggtcgaccttcagcgtcaggactggctggtctgggttgagggagttgatcttcaccagtttggggtaccggtcgcactcatgtgtctcttgtgttgggggccagcagtcgggggcccattcctcccagtggtcacgcatctcacgaagtactttcctgcatctcagcctctgcaggagctcgcgcgccaccgatgggagggctgccatgatgagggcaaggactgcgaacccgatgatgtaattgaccgtgtccctcgtcacgccgttcttgccgaggattccgatggcgaacgcgatgacgacaccgcccaggcacaggtgcatggggtcatgctgtgatggtttttcttcttcagcgactggtggggctatagtcatgtgtgccccttagtactaagtgatactggtgggttgcttttccccggtggccgtgtgcaagacggccaccggggttttccttcatgttcctgattttatctgcccggtgtggcgttttcatctttgtgtgggtggttcgcctggggtcttggagtgtggtgacgcggtgatggtcacggtgacggtgactgtggcgcgtggcgggtgaggtggttctttcctggtctggtgtgtggcccaggtgagtgtggtgatgagggccagggtgaggatgatgaccagggtggggagtagtttgtctggccggtgtcgccgggcttggtggcgcggcatgtttttccagggtgtgtctccgaacaggtcgtcgtcggaggggtcgtcgtggttcatagggtggccttggcgatggtggtgggcgagtttggtccaggtgatggtgccgtcggaggcgatgtggcggtcggcgggcagggtgtggacggtccatccggcgtcggtgagggcggtggtgaaggatttcttgatggatcgtttgggtaggtcgatgggggcgtgggtgccgacccagatgcaccggtttttgaggtgggtggcgccgaggtggttcatgtcgcggaccatgttttgggtgagtgtgagggtgtcggggtcccattggacggggatgatgatgtggtctgcgatggtgatggcgtgttgccaggcggcgtcgaggtcgttgtttccggtgtcgaggatgatgacgtggaagcggcttcttagggcggtgatgatgcggtcgaggtcgtcggcggtggggggtgtgatgaggctgttgtggttgtcggtgatggtgggtaggcatgtgatggtggcccagccttctggttgccaggagatgtaggggtcgaggtcgcggggttgggaggcgaatcctgggtgacgggctgcgcgggcgaggtcgatgacggtgttgtcggtgtggcggggtgcgcgggtggagagggtgccgcgtgggttgatttccacgacgacgatgtcgtcgtgtcctgctgtggtggcgagggcttgggcaaggatgacggccagcggggttttgccggtgccgcctttgaggttggcgagggtgatgatgtggtcggtgagttgggcgggtgcggcggtgtggtgagggttggcggtgaggttggcgatggtgaacagggcatcgagatcgtcggtggtgttctgctcggtgggttgggggtcgccggagatgatcgggtcggcgcggcgcggctgccatgccggcctcaccactgtcacgaccaccacgggtctgctggcgctgtgtgggtgtcgtcggcgatgactcacgatcggcagtctcaccatcgtctcggtgatgctcggctagcgctggacccggtcaagttcgggccggctcacccagtggtgatgactcggtcacagaaccgctgccggtcgttatctcggacgtctcgactcctccagtcctgatgggcgttggagccacctacacctactctcagaacgaccccgacctcgtgtggggcgggggcagatgtcacttgggccaatcgagagcccaggtgatggggaaagcaggggtgtgatatctgtcctggaaaactgggcagctgctaccgtggattgacggatctccacgaaagaagggaatgcgaccatgcagatcaccgtcaagaccatcaaagatcatcgggttcgcactgtccagaccgccatgagcagcgccttggggattggttcccaggtagacatgctcgcccccggcggttccaccagctcgagttccggttcatgctgctcgtgctcgacctgcgcggtagtggcgcagcctcaagactgaacggctggtcagccccaggggcgtggcgctcatcgcgtcacgccccttctattcgctggacagggtgcgcgagctgaggaacatcgcggtgtgtgcgatgacgaggggcaggagcaagtctgtgcgggttgccaagtagccctgcgcgatggccatcacgctggccccgacggcggcgaagacacctccgatacgtcgcttcatgccgccgaattgcatcaggacgaataggactcccgcggtccacatccctccgggcatgcatctgggaaagatgaaccggaagatgatctcttcacaggagagctggagtactagcagcgtagcccccacggggagactcacctctactgacagacggatcgtcttcatccacccacccgagctggcatcgaccatttcggtggccatgcgcgaccggtggcctcgtgcctctcgctgcgtgtcgatccagccgagcagtccgtggacgctctccgctaggactcctgacgcgacagtctcaccaattcctaagcccacggcgaggaccgcgacgcccccctgcacggcaggctgtgtgacttggtggtcccaccaacccgccggcaggaccatgcgtgcgaggctgcacacgagcaggaggtggagggtcacgacgagcgacatctggaataccgcttgccgttcggcgatggtggcgttgggaaagagcggtaggccggcacgggcagcggcgctcgacagcttccgcaagagcggtttggagacgaagtagtaggcgacgtacagcgccagcgctgtcgcgatgatgatcatcggtctgccaccgagctgacccgccgatagccgtttctgttccaccaatactggctgttgtagatcaggtggcccagaacacaggcccagatcccccagaagatgaacaggatagtccccaaggcggcgagcgggatcttggagaggacctgtccccgtccgaacaccgagtggccgcaagcaaacaagagtgctcccacagcggtgagcgcgagccaggccggggttgctcgcagactgatcaccgggaccccgacccggaagccgacctcttctcctacagcgatgactagcaactgccacagcggcatgttctgaacggagcgcgcgactcgggctcgagtcacccacacgggctgttgagcgctcacatcaccactcaggtaccccggtgaggcacttcgcttagtactggggcccgatgtgcgagcattcgtgatgtgtcgcaggatccggttgtcaagccaagaggccagcagggctccggcgacagtgacgggtagcccgatcagcacgaggccccagccatgcggtgccgagaggtttctggccggcgtgcacgcgaggcaggcaaatgccatcactgccagcactacgacgtagatggtcgcataattcgacttgcgggtgacgttgccgaccatcttggccaaagtcgctggggaccagctgatgagtgcgatggtggtcagcaggaagcaggaccagacagacatccggcgcactcaggggtatgggtgcggctgtgggttttggaaaccgccatatgcggcgtagcgggggtgtgcccgcatgggtgcgctgggcagtgacagggcgagcagcccaggcgcccagagcctgacacagtgcagtcccagcccctggatctctatggtggtgaaatcttcgatgtacaggggtgacacacaggtgatgctgttgaccacgctctttaccagttccgcccccgtgtgggtgtcgtcaggtggcaggtcttcggcttgggcaatggtgcccgcgtcgaatttcgccacaactgattgcgcggcctgatagttcctcgcgtagtaggagacgttcgagtcgaggtcaagcatgtcctccgtggacatactggacgcgtcggcctcggcgtcgaaagacgtccataccgcgagcatccgaaccccgctgcactcgagaaacgccttgtacatggctgcttccagacccgcgtctgcacctaggccgacggcgacgaggggaagttggttgccactaccgaccatcatgcatgccacggtgaaatgcttgagcccgggagtcggaagccagtagaaacgcagttcgtggcttcggcccgctgcacgttccacgagccgctggatgcgctggaggcggggtccttcgacgcggatgcgcacaggtgacgaggctccataccacaggcccatcgcggcatctacctggatcaattcataagccgcggacagcgttgcggcgacgcgtgaagtgtggacggcggtgccggtcgtcacggccgttcccagccacggctcaccgtcgtgccgacgggggttgtaacccaggtaaaagaactgcgccgggatccactcctgccgggaggtcccgacacggggagtcttgacccatgtcatgggcaagtcgtcgcgataggtgtcgaacgcacctccagccactcgttgcgcgaagccgaatgcgcccagatcgagaacttcgtcctcggtccgggcgaggagttcctgacgagtcgcccagcgccgttcgaagggactatggagaatcccggtacccgcgcagtagcgctcgacggcctccgcgtagaccttgatctctgcctcaaactcgttcagccccaccccaccgatgtggtagctacccggcttggggtcgggccggtcaagcagtgcgtgcatccccgtgagttccccaccgttcacccgcacgcgggggccgagcgcggggtgcagcgagtagccgacggaagtcaccagcccgcatagcgggctgtaggtgcgccgcctgagccgggctgcggtctcgacggggtcgctatcctggcgaagcttcatcgctcgccccctgccgccagccactcacggatgtcgtagtacaggtccggagcggtttcaacctgcgctggtgcatcaaaacgggacataggtaggacgtcgttgtaggcgatctccatcgtcggtatgtagaccgacaacactttgttgcgcgtcgtgttgaggccgttgcgggcgatgctgacagcctcatgcgcgacgtgcgcggccaagatcgcgcgcaccgacgctgccacggccggcgctccggcccttacgcggtcggcagcggccacccgcatccaggacaggtagctctgccgttcgcgcaggttcatcgcgacccgctgctcgaaggtccggtaggacgaggtcgcaccagggacgacgtagggacccacgtacaaggccggcccgtctacagctgcgtggagccacgacaggtgggcgcgtcgggcgaacaggtcaagggcgcgcagcatagccgggttgttctgcgccagcgctaccacaaggagtggctgcaggtccggcgccgaacccagcaacgccaacatctgggaggcctcctgctccatgtgcaactcgtcggccgactgctcaagccgcaggcctgcgaagagggtggctgatggctgcgtgtcgtcagcgaggacggtagcctgcagcccctctccctcgagaatctgctggatatcgccggcgaggagcgcgtcgtcgctgaatacccacaccgggcgcgtctctctacctccatccatcttgtcctcaacgttttcgaccagcgcaccgatcgatgctaggtgggccatcacgtcgtcaagggccgcgcgggtcaatccgggcacccgggacacgatctcgggcggctgcagtccttggctcaacaagtccaaggccggccacagggtcccggtggcgtcgtcgtcctccagcgttgtgctctcggcgttccagacgcctcgacggaactccaccctgtccatcgagtaaggcaccatcatgaggcccggtgaaatgtggttggtcactttggctcctgtacagcctaggcttggacgcccacggtcatggtgtgggtcgcggtttggaaaatcccgtcgaggttgagtgcctgattgagttcgtcctcgtagaagcttgaggactcgactgaggcaagaccgagccccgtgcagaccaagttgatctgttgtgcgatcgccccgacttcttgaagggcgaacctcaaacccctggctccgtacttccgcatcgccctccacggcgagatgacgaacaccaagtgcactccggccgcatccgattgctccacggccggctcgccggccatcgaattcctcacgccgcgacagccctcttcaccggtcacgggcaccagtcgatcgatgaccggcgagtagcggtagacgccgcgactcaagccggacacccgttgtgcggacatgaagatagacacgggatacagccctccaccagacgggacagcgcgtacattataccgcacgatatcaccgctcgaacgtgggacatccacgtgccccgtcacaccggcagcacctctcagaaacgcagctacgtcacgcaggtctagggattcgccggtgtagttccgtccgctgcgccggcgggcgatcacttgctcgaggggtgcgcgcaccctgctggacctgggaagttcgatcacatcggcagcgaacgtgtcgcgatccatctgtccgtacgtaacgatcatggggtcaacgaaatagtcgccgaccgagacgttgaactccatatccccccgggcgatgcgcgaggcgagcaagaagtctgcagctgcgttagacagccccggcccatcagtgttgtcgcagcggaactcgtgggtccgaaaccccacaccttccgtgcccgggctctgcgctcgatacgacgtgatcgcagaactagccttccttaaaccgcccggagtagctaccatgaccgtcccctctgaggtctcccgaacacttgcgacaatagcagcatgtgggggcagccgccagaggcgggcatccttgtctcgacaaccattgacctccggattcgatatgtgcataatcatagtcgtgccaacacgaaacgtgtacgtctcggaagacgacctagacctgttcgccgaagccaccgagatcgctggaggcctgtccgcagcggtgttggaggccttgcgcagctacgtagacaggcaccatcgcgcggccggcggattcgacgagatcgagctggagctgcagaacgacggtatcgaccaccgtgtcaccttcatgggtcgccgcctgatacacatccgccgtccagatcccgagggaacccgcatagacactgtctacttgaccgccaaacaccaattcgccgttgccaccaaaatccaacgacggctgccagactggacgaccggccacgagcacatctggtccgacccggagacctggaatcgggagttctggatcgcaggtgacaagacgatggccgtgtatcccagccttgacaaactccgcgaagctgaccccaatgtggccgaacgcgccgaggccgcggtcaaaatcccgccgttcgaggtcctggacatctgatgacagaatcatcatcttcccggcggcaattggcaatgccggtgctgtcagtcacggatctagccaagaaatacgtggttcatggcggctacgaggtcccggcactcaacggtgtctcgtttgacctgcacccgggagagatgctgggtttgttcgggccaaacggtgctggaaagacgacgctggtcaggatcatcgcgggcctcttatcggcagattctggagacgtccactggggatcggatcaaggtcgggccaggttaggctacgtgtcccaaaagggtggactgcagtacgggctcacgtgccgggaagagatggtcttccacgcacaatgcttcggccagtccgccaagcaggcccggactagcgtcgacgaggtcgccgcgatgctgcactgcgattacctgatggagtgggacgtcggaaggctctccggtgggcaacgccgaatcatcgaggtagggctagcactcgtcaatcaaccatcggtcgtcctgctcgacgagcccaccctgggcctggaccccgcaacacgcctgtcgttgtggcaaacggtaaagtcggcacgccgtgagaccggtgctgccttcctcgtcaccacccactacattgacgaggtggccgagcacctgtccaacgtcagcgtgatcaaccacggaaccgtcgtcgccaacggctcgccagcgcacatccgagaaatgttcgcgaccggggaagtaacgctcggcgtggccgaggatacggtggacagtgcggtggacgtgttggctgggaccgcgttcgaggcgcaccccaccgaaaccgtcccggggatcgtggtcaggtccaggcatcccgacgtggacgcggccaagatcatcaccatcctggctggtcatggcatctcggtggactccatatccgtacgcgaggcgaccttggaagaggcgtttctcacgatcacaggcagtcgagacccggagaggcaaatcccatgaacacttgcttcaggcgatatgcggcgatgtcgctgagagcgcggcgtgatttggccctgacattcatccagcccctcgtctacctagccctcttcggaccgctcttcgtcacgacgatgaagatgtcgcagagagctaccgccgctacgggttactccctatacatcacgggcctgtccatccaaatggccatgacgatcggtgccttcgcggggctaaccatcatcctcgaataccgactcggcatcctcgaacggatctggagcacccccctcacggggagcaagatgatggcggggcgaatcgcgcgcgacgtcgttatgatgatgatgccgatactggtcgtcttcatcatcggcctggtgctgggaacacgccccagcccactgggcctggcgacctacttcgtgacagtgctcggcacaggagccacgttcgccggggtctcctacgcggtggcactcagaacgaagagcgaggcagcgctatccgcgatcttcaacctcatcctgctacccatcctcctgctgtcggggatcatgctgcccatgtcgttcgcaccacactggatcgccaccgctgcccacgtgaacccgttgtggtacctggtgcaaggcgcgcggaaccagttcagcgttctagggctcgtggcggcggccccatggagttgggctgtggccatcgtcatgtcagccgctgccttcggctgggcaagccacgaattcaacaagaggcgctgacacaaagaatggtgccgggaacccaggtccccggcaccaccgagtgcactcgcgacgtcaacgcaccgttgcggtcactgcgcaggtcgagcacgaggacgacgagcccgcgctgctgcaggtcgagccgccaggcgcgagcaggtcgacgttagcgtcggcgccgccgaagacggacgtgacggccggctgagaggtgcggatgcggtgctccagcgaggaggtggtggtgagtttcatgggaggtgctcctaggagtgagacgagaacaaaccctagcgataggttagcagtccgcaaccgactccgggaatagtagaagcgcgcatccgtagcggaagaccttagcctgattacagtgaccctgttcgcgtctcaacattattccacacccccgagcagcgaacgacaccgcgatgatgatccgtcgcctctccaccgaagaactccgcgcccacatcgcaccgggccgccgtcccgtgcatcagacctgccgtcaacgtcggccatgaagctgggaaggtggctctcgtctaggagcagacgcgggacgcctcctccaggttgggccggggaagtgtccggttcttgatgtaggtggcggtccctattgatgggcgttgaccgtgggaatgcggtcggcgaagggggtggcgaacccgttgagcgcaggcttccagcgcatgcatcaacgctgtctgccggccaccggcaagcctcacccgcccgtcatggccatcatcgaggtgccggtgaatcctcgacacatgatcccaactcccccggaggggcttccggggctgttcagccaccagatcagccaggcggcgagcccgactctgccacccggaccctgcagagcgtgcctgctgccgtcgtgtcgtgtcgggccagtgggccaccagatcggccacatccgtcttggcccatct

SEQ ID NO: 113 - DNA, 16493 bp, Propionibacterium acnes
gtgttccagtgcctcgcgggcgtgatgttcttcttcggcaccttcttgccacatgcttcgcgcttcagcctcgccatccaagcgaacctggactgtgaacgagtcctcatcgggtccgtcctcattccacgcggcaatgatcccacgggcctcgtctgcgacctgactcaacttcatcgcctgcccgacagccccgagagccggaatctcgaacacccagatattcgcctcagccgagacctcacgatgggcgatcacttcgtaggtcgtctcaccttctactgtcgtgtccattacttccactccttcggaattttcacgcctgctcgctccagctgtgccaggacaccaactgacgtcagctggtgtcctgctggtatcgatacgcgcccggctccgccggggcgtccccagatttcatggcttcccttggcgttccgcagacgggcccatccttgagaacggagcagcttgaggacgtccttagttttctgcagtttcacacatcatagtatagccccacttaacttgtaaactaagcccctgtttacattttagttggtgcatgtgatccctgctcttatgacgtcgcccgacctggcgccttagacatgcactgttcatcctcaaccacactcaccgtcacgggtccgaaggcgaggtctatcaccattcgcatcgatgaagttgaagcaggatcgtccgcatcacgcactgccgatccggacagacgccaccggccgtaccgactgtttacgatctgccaccgcagactgctgccataaccgctatcacctctgatagtacgtttagtactatcagaggtgattcaagattctcctgtcgagcagccctacagtcacgaagtcctgcgatcgtcatcgcttaaggcagacggatggccatcggggaccactcgcaaagcaggggcgatcagcaacagtgatgtgccatgagcaagtactggtgcaccggctgtttactccgcccctagataaaccacgggtgcaggggtggacaccacaccatgaccgatgtggtgcccaccccatggctcacaggcaggccctatcgccgggagcactgctgcagatgaggctcagtaacctgccatgtctcacctggggccaaggtgccaagctccccacggaatctcaggcatcggaaaccagcagccgaacttccacagcatgagcgccctacgaaaaagcaggccgccgacggttctcaagaactcgccggcggcctgcatcgccactcgaactgtaaccgtggtccgaccccgtgcacaggtaagctccacactcccaccaggcatggccgaggcagtaccaagttgccgtggcccatcggcagatttggttaaattttgaaaagtcatatagactccttctgtaaatttttaaatctcataggactctcgccatcgccagccagcttcgacaggagtcccgatgtttcaccgagtgaaatatcggcaccgtttgagttgacctaaagctcaaaagatgctagaatccatcttacctcgttaggggcgttttgtcaaacgcccctatattgcgtgtcttcgcgcgtcgtagcgctgatgctgcgcctgtgtcgactatccgtttgtaagtactttcgatgacaccagcagtggctactcatgactggtgcgtgcgggtctaaagcagcagggaaaggaatcgcagtagaagccgcttgattcctatcacccctgatggtactatcagtactaacagagcagggcttactcgatgcgtgagaatcggggacatgctgagcctctcgtaggtcattggcctgctgggcgtcagtgtggcgcggttcgatccagtgaactctatcagctctgttagtactgtcagagttgatatattcgaccccaggaggagcccatgagttacatcgttcgcaccggaaatttggtcgacacccccgagctgcgtgagggagagcatggcccgtacacctacgctcgcgtcatcgtgtccgatcgcattcgccaggaggacggcagctacgtcaacgggccagcgatcgcctacgacgtcttggcgggtggcagccaagccgtgaatctggttgaagccgccaaggcgagcggcaacatccgcatcatgttcgcgggccgttaccgcgtcaccgagtggcgggggagcagggcactcgtatccagcatgaggtccgagccgacgaagtgagcgtgagcctgctcggtcagagggtgaccgtggagcggcctcgaggtgacgtggcatccaaggagagcacgtcgttctgattgagtccgggggcacggtggtcgccgtggtaaaccgtgcccctgacagtactattgacactattggaggtatcagtgtgactgctcaaattttcgccttgtgcaaccagaagggtggcgtcggaaagtcgacatcgacgtttcatctggcccgtgccgcggtgttgcgtggccagcgtgtgcttgtcgtcgacaacgacccccagggcaacctgacgtctgtcgcggccgccgagcccgtgggggaggatcaggcggggctggccgatgtgctcagcgcgcgtgctccagagaccctccgcgatgtgatcgtgccgggaatctggtctggcctcgatgtcgtgccgacgtctggcatcacgctcggctgggtgcgtgacgaactcgtgatcgccggtgccggccgagaaggccggctgcgggaggccctggccggcgtcgaggacgactacgacgtgatcctgatcgactgtgctccatcgctcgatcagctcacgatcaacggcctggtggccgcccagggtgtcatcgtcgtgacgcactcgaagttgtggagcgccaacggcctcgcccagctgctcgacaccatcgacagcgtgcgcagctactacaacggcgcgctgcgcgtggcgggcatcatcgtcaaccagcacgaggagaacaccatcagcgggaaaacctggctcgacgagctgcatcaggctgccgagtcccggaagctgaccgtgcttgacccgccgatccccaagcgtgtcgtcatcgccgataccgtcgaggccgcgcgcggtctcgacgagtggggaagtgccgaggcggccgcgctcggccagttgtacgcccaccacctgacctgcatcgaaggagccctgtgatgacccgtccagccccccgaaagtcctcattgagcggatcaactccggtcgccccgccggctcagacggcgccggcaccgtctgccgcacctaccccccacaaggccgatgagtcacagacgagcagcaccacgaggaagtggcggcacaaggtgtcgttctaccaggacccggccgacaccgaccgggtgcgcggggcgatcctttacacgatgacgaccgagggcaaccggaacctgagccagttcgtcaacgatgccgtcatggccaaggtggtcgagctggaagtcaagtacaacgatggccagccattccccgctgtgggagcccgaggactaccccagggcggtgcagccgccgccggtgagtagaggaccatcgaccgtcgggggcttcaccatgcccccgaccctcggtcatcctgatcctcttgtcgatggtggtgacagtgggggattcacgcctcgttcagatcagaggaagtctcaccgcgtgattagtactatcaaatctgacagtactaacagagcagatagggttccctaggtcgagctgtatcacgccgacaaccagtgagccagtgatctacgaggggcgcaatatgcacccgatcggtagccgcgaaggcctcgccctgccccgatagtactatcaccactatcaatggtgctagtggtgagtttcttccattgatgacaacagcacagtgctgccgtctgtgtgcgggccaccagcccgcacacagttgccgtcgaggacgttgttcatgctctgtggtggccggtcctgagggcggctcgcaggatctcccggcgctcacggcgacgagcctggtagccaaggtctgcatgttcggcggcgagacgggctttgagggttgcggcttctgcacggcggtggagttggtcgtcgatgagttgggcgcgggccagacgccgcttatgggggttgtcgtgggtgaggggggcgtcgaggctgccgtcgtgggttagggccagggctgctcgttcggcgtcgtcgaggccgatgtggtggacggtcacgggtgcggtggtgacgtcgaggatgtccaggtggatgttgtggccgccgccgggggcttcggggaagtctggtgggctggcctggccggtgtcggggtcataccaggacaggccgatgatctcggcccagggtgggggcgggcagacggctcgcagaagggtgtgggccaggaacgtgttgcgggccatgatgcctccaagggtgaaaagcagtcgagtagcgatgacggcggggtagccgtctgctgggctgaggccgaccgggcccatgtcctcgatgctcttgtgctgcggccataccccaaagctaccaaacagtctttttaatctcaaagatacaaacagtgcttgacatattatctgcagcgaaagatactttcatcatggtggctgatcatgattacgcgactcctgacgatgagtggatgacacctcctcaggtggcccgtgtgattccgaacaccactgctcaggctgtccggcgctgggctgaggagggtcagcttcctggggcgtttcgtactccttctgggcgttggcatattccgtggtcggctgtggtgggcatcatggggtttgatccgcgtgagtccgcatcaccgagtgatcgtcaccagagctgacagagtcgtcgatgagctttcgagtgcagagctgatggcacgacggtctggatacttgtggagatgagagacgaccacatccagtcatggtcggggtacaccgaggggcagattcagcagtgctggcacgatgaggttgcccctgccattgactcgctcatggagcaggtaaggtctgttgccgagactcctgtgccgccgggttcgagattttacggcgatgagcagtgggccaagccttttcatccgtctactgcgatctgcggttcaatgggtccgccagcgatcacttgcacgcgctgaagctcctcgtctgggaagcgaacgtccaccatgtctatgcgccgtacacccttgctcgtgcatctattgaggcatcgtctactgctgtgtggctgttgagcacgaagacgcgcggagaacgtgtgctgcgagccttgcgatggtacgcgcaggattgtcacgactcgtgcaggttcatggatgatgagcagtatcgtgaccacctattgcggcgcattgaggggactgtcgctgcgggaaatctcgactcgcgcgctgctaggaaacggtaccgtgcaaccgatgttgtcgatgaggctgatcagctggttcccggaactctgagggcgtggcgagctttttctggtatggcccattcccgtatgtgggcatccagggggctgctcgacatggaagtgctgtccagtggccaaggaatggttacggcgaaggtgacgagcggatcggcccaaatcctttgggccgtcgtggcagctctgaatgttgctctcagtgccgctcgcttgtggcgtgattcgatgtgctcaccgtttgctgttgcccagtcggtagacgcgatgccagaggcgtttcgccgccctgtttagggtctgatcggggtagtgggtgttcacggggtcccaggttggccatggggcggcttggtgatgtgagttgggttgtgtggcagcctgggtgttgggtgtggcttcgttggccacgaaggcatgctcttccttgtgctgggacttgagtccccagtgctctcccctttgctagtggggggtggggtccccggaggtaggtcctccggggactttttctatgtctgtccgtgccccaggatttcgtatctaggcagtaccaattttgggttagttggaggtttctttggtaatggacagggtgagggtgatgaagaggtggccgtccttggtggcagaaattttctcgaacttcagctgaatgttgttatcagccactatctgttgggcggtgaggtgctcggagagcttctggaatccttcgcggatccacaggttgtaggggttggtgaccgagaccgaagggtatgggtcgaccttcagcgtcaggactggctggtctgggttgagggagttgatcttcaccagtttggggtaccggtcgcactcatgtgtctcttgtgttgggggccagcagtcgggggcccattcctcccagtggtcacgcatctcacgaagtactttcctgcatctcagcctctgcaggagctcgcgcgccaccgatgggagggctgccatgatgagggcaaggactgcgaacccgatgatgtaattgaccgtgtccctcgtcacgccgttcttgccgaggattccgatggcgaacgcgatgacgacaccgcccaggcacaggtgcatggggtcatgctgtgatggtttttcttcttcagcgactggtggggctatagtcatgtgtgccccttagtactaagtgatactggtgggttgcttttccccggtggccgtgtgcaagacggccaccggggttttccttcatgttcctgattttatctgcccggtgtggcgttttcatctttgtgtgggtggttcgcctggggtcttggagtgtggtgacgcggtgatggtcacggtgacggtgactgtggcgcgtggcgggtgaggtggttctttcctggtctggtgtgtggcccaggtgagtgtggtgatgagggccagggtgaggatgatgaccagggtggggagtagtttgtctggccggtgtcgccgggcttggtggcgcggcatgtttttccagggtgtgtctccgaacaggtcgtcgtcggaggggtcgtcgtggttcatagggtggccttggcgatggtggtgggcgagtttggtccaggtgatggtgccgtcggaggcgatgtggcggtcggcgggcagggtgtggacggtccatccggcgtcggtgagggcggtggtgaaggatttcttgatggatcgtttgggtaggtcgatgggggcgtgggtgccgacccagatgcaccggtttttgaggtgggtggcgccgaggtggttcatgtcgcggaccatgttttgggtgagtgtgagggtgtcggggtcccattggacggggatgatgatgtggtctgcgatggtgatggcgtgttgccaggcggcgtcgaggtcgttgtttccggtgtcgaggatgatgacgtggaagcggcttcttagggcggtgatgatgcggtcgaggtcgtcggcggtggggggtgtgatgaggctgttgtggttgtcggtgatggtgggtaggcatgtgatggtggcccagccttctggttgccaggagatgtaggggccgaggtcgcggggttgggaggcgaatcctgggtgacgggctgcgcgggcgaggtcgatgacggtgttgtcggtgtggcggggtgcgcgggtggagagggtgccgcgtgggttgatttccacgacgacgatgtcgtcgtgtcctgctgtggtggcgagggcttgggcaaggatgacggccagcggggttttgccggtgccgcctttgaggttggcgagggtgatgatgtggtcggtgagttgggcgggtgcggcggtgtggtgagggttggcggtgaggttggcgatggtgaacagggcatcgagatcgtcggtggtgttctgctcggtgggttgggggtcgccggagatgatcgggtcggcgcggcgcggctgccatgccggcctcaccactgtcacgaccaccacgggtctgctggcgctgtgtgggtgtcgtcggcgatgactcacgatcggcagtctcaccatcgtctcggtgatgctcggctagcgctggacccggtcaagttcgggccggctcacccagtggtgatgactcggtcacagaaccgctgccggtcgttatctcggacgtctcgactcctccagtcctgatgggcgttggagccacctacacctactctcagaacgaccccgacctcgtgtggggcgggggcagatgtcacttgggccaatcgagagcccaggtgatggggaaagcaggggtgtgatatctgtcctggaaaactgggcagctgctaccgtggattgacggatctccacgaaagaagggaatgcgaccatgcagatcaccgtcaagaccatcaaagatcatcgggttcgcactgtccagaccgccatgagcagcgccttggggattggttcccaggtagacatgctcgcccccggcggttccaccagctcgagttccggttcatgctgctcgtgctcgacctgcgcggtagtggcgcagcctcaagactgaacggctggtcagccccaggggcgtggcgctcatcgcgtcacgccccttctattcgctggacagggtgcgcgagctgaggaacatcgcggtgtgtgcgatgacgaggggcaggagcaagtctgtgcgggttgccaagtagccctgcgcgatggccatcacgctggccccgacggcggcgaagacacctccgatacgtcgcttcatgccgccgaattgcatcaggacgaataggactcccgcggtccacatccctccgggcatgcatctgggaaagatgaaccggaagatgatctcttcacaggagagctggagtactagcagcgtagcccccacggggagactcacctctactgacagacggatcgtcttcatccacccacccgagctggcatcgaccatttcggtggccatgcgcgaccggtggcctcgtgcctctcgctgcgtgtcgatccagccgagcagtccgtggacgctctccgctaggactcctgacgcgacagtctcaccaattcctaagcccacggcgaggaccgcgacgcccccctgcacggcaggctgtgtgacttggtggtcccaccaacccgccggcaggaccatgcgtgcgaggctgcacacgagcaggaggtggagggtcacgacgagcgacatctggaataccgcttgccgttcggcgatggtggcgttgggaaagagcggtaggccggcacgggcagcggcgctcgacagcttccgcaagagcggtttggagacgaagtagtaggcgacgtacagcgccagcgctgtcgcgatgatgatcatcggtctgccaccgagctgacccgccgatagccgtttctgttccaccaatactggctgttgtagatcaggtggcccagaacacaggcccagatcccccagaagatgaacaggatagtccccaaggcggcgagcgggatcttggagaggacctgtccccgtccgaacaccgagtggccgcaagcaaacaagagtgctcccacagcggtgagcgcgagccaggccggggttgctcgcagactgatcaccgggaccccgacccggaagccgacctcttctcctacagcgatgactagcaactgccacagcggcatgttctgaacggagcgcgcgactcgggctcgagtcacccacacgggctgttgagcgctcacatcaccactcaggtaccccggtgaggcacttcgcttagtactggggcccgatgtgcgagcattcgtgatgtgtcgcaggatccggttgtcaagccaagaggccagcagggctccggcgacagtgacgggtagcccgatcagcacgaggccccagccatgcggtgccgagaggtttctggccggcgtgcacgcgaggcaggcaaatgccatcactgccagcactacgacgtagatggtcgcataattcgacttgcgggtgacgttgccgaccatcttggccaaagtcgctggggaccagctgatgagtgcgatggtggtcagcaggaagcaggaccagacagacatccggcgcactcaggggtatgggtgcggctgtgggttttggaaaccgccatatgcggcgtagcgggggtgtgcccgcatgggtgcgctgggcagtgacagggcgagcagcccaggcgcccagagcctgacacagtgcagtcccagcccctggatctctatggtggtgaaatcttcgatgtacaggggtgacacacaggtgatgctgttgaccacgctctttaccagttccgcccccgtgtgggtgtcgtcaggtggcaggtcttcggcttgggcaatggtgcccgcgtcgaatttcgccacaactgattgcgcggcctgatagttcctcgcgtagtaggagacgttcgagtcgaggtcaagcatgtcctccgtggacatactggacgcgtcggcctcggcgtcgaaagacgtccataccgcgagcatccgaaccccgctgcactcgagaaacgccttgtacatggctgcttccagacccgcgtctgcacctaggccgacggcgacgaggggaagttggttgccactaccgaccatcatgcatgccacggtgaaatgcttgagcccgggagtcggaagccagtagaaacgcagttcgtggcttcggcccgctgcacgttccacgagccgctggatgcgctggaggcggggtccttcgacgcggatgcgcacaggtgacgaggctccataccacaggcccatcgcggcatctacctggatcaattcataagccgcggacagcgttgcggcgacgcgtgaagtgtggacggcggtgccggtcgtcacggccgttcccagccacggctcaccgtcgtgccgacgggggttgtaacccaggtaaaagaactgcgccgggatccactcctgccgggaggtcccgacacggggagtcttgacccatgtcatgggcaagtcgtcgcgataggtgtcgaacgcacctccagccactcgttgcgcgaagccgaatgcgcccagatcgagaacttcgtcctcggtccgggcgaggagttcctgacgagtcgcccagcgccgttcgaagggactatggagaatcccggtacccgcgcagtagcgctcgacggcctccgcgtagaccttgatctctgcctcaaactcgttcagccccaccccaccgatgtggtagctacccggcttggggtcgggccggtcaagcagtgcgtgcatccccgtgagttccccaccgttcacccgcacgcgggggccgagcgcggggtgcagcgagtagccgacggaagtcaccagcccgcatagcgggctgtaggtgcgccgcctgagccgggctgcggtctcgacggggtcgctatcctggcgaagcttcatcgctcgccccctgccgccagccactcacggatgtcgtagtacaggtccggagcggtttcaacctgcgctggtgcatcaaaacgggacataggtaggacgtcgttgtaggcgatctccatcgtcggtatgtagaccgacaacactttgttgcgcgtcgtgttgaggccgttgcgggcgatgctgacagcctcatgcgcgacgtgcgcggccaagatcgcgcgcaccgacgctgccacggccggcgctccggcccttacgcggtcggcagcggccacccgcatccaggacaggtagctctgccgttcgcgcaggttcatcgcgacccgctgctcgaaggtccggtaggacgaggtcgcaccagggacgacgtagggacccacgtacaaggccggcccgtctacagctgcgtggagccacgacaggtgggcgcgtcgggcgaacaggtcaagggcgcgcagcatagccgggttgttctgcgccagcgctaccacaaggagtggctgcaggtccggcgccgaacccagcaacgccaacatctgggaggcctcctgctccatgtgcaactcgtcggccgactgctcaagccgcaggcctgcgaagagggtggctgatggctgcgtgtcgtcagcgaggacggtagcctgcagcccctctccctcgagaatctgctggatatcgccggcgaggagcgcgtcgtcgctgaatacccacaccgggcgcgtctctctacctccatccatcttgtcctcaacgttttcgaccagcgcaccgatcgatgctaggtgggccatcacgtcgtcaagggccgcgcgggtcaatccgggcacccgggacacgatctcgggcggctgcagtccttggctcaacaagtccaaggccggccacagggtcccggtggcgtcgtcgtcctccagcgttgtgctctcggcgttccagacgcctcgacggaactccaccctgtccatcgagtaaggcaccatcatgaggcccggtgaaatgtggttggtcactttggctcctgtacagcctaggcttggacgcccacggtcatggtgtgggtcgcggtttggaaaatcccgtcgaggttgagtgcctgattgagttcgtcctcgtagaagcttgaggactcgactgaggcaagaccgagccccgtgcagaccaagttgatctgttgtgcgatcgccccgacttcttgaagggcgaacctcaaacccctggctccgtacttccgcatcgccctccacggcgagatgacgaacaccaagtgcactccggccgcatccgattgctccacggccggctcgccggccatcgaattcctcacgccgcgacagccctcttcaccggtcacgggcaccagtcgatcgatgaccggcgagtagcggtagacgccgcgactcaagccggacacccgttgtgcggacatgaagatagacacgggatacagccctccaccagacgggacagcgcgtacattataccgcacgatatcaccgctcgaacgtgggacatccacgtgccccgtcacaccggcagcacctctcagaaacgcagctacgtcacgcaggtctagggattcgccggtgtagttccgtccgctgcgccggcgggcgatcacttgctcgaggggtgcgcgcaccctgctggacctgggaagttcgatcacatcggcagcgaacgtgtcgcgatccatctgtccgtacgtaacgatcatggggtcaacgaaatagtcgccgaccgagacgttgaactccatatccccccgggcgatgcgcgaggcgagcaagaagtctgcagctgcgttagacagccccggcccatcagtgttgtcgcagcggaactcgtgggtccgaaaccccacaccttccgtgcccgggctctgcgctcgatacgacgtgatcgcagaactagccttccttaaaccgcccggagtagctaccatgaccgtcccctctgaggtctcccgaacacttgcgacaatagcagcatgtgggggcagccgccagaggcgggcatccttgtctcgacaaccattgacctccggattcgatatgtgcataatcatagtcgtgccaacacgaaacgtgtacgtctcggaagacgacctagacctgttcgccgaagccaccgagatcgctggaggcctgtccgcagcggtgttggaggccttgcgcagctacgtagacaggcaccatcgcgcggccggcggattcgacgagatcgagctggagctgcagaacgacggtatcgaccaccgtgtcaccttcatgggtcgccgcctgatacacatccgccgtccagatcccgagggaacccgcatagacactgtctacttgaccgccaaacaccaattcgccgttgccaccaaaatccaacgacggctgccagactggacggccggccacgagcacatctggtccgacccggagacctggaatcgggagttctggatcgcaggtgacaagacgatggccgtgtatcccagccttgacaaactccgcgaagctgaccccaatgtggccgaacgcgccgaggccgcggtcaaaatcccgccgttcgaggtcctggacatctgatgacagaatcatcatcttcccggcggcaattggcaatgccggtgctgtcagtcacggatctagccaagaaatacgtggttcatggcggctacgaggtcccggcactcaacggtgtctcgtttgacctgcacccgggagagatgctgggtttgttcgggccaaacggtgctggaaagacgacgctggtcaggatcatcgcgggcctcttatcggcagattctggagacgtccactggggatcggatcaaggtcgggccaggttaggctacgtgtcccaaaagggtggactgcagtacgggctcacgtgccgggaagagatggtcttccacgcacaatgcttcggccagtccgccaagcaggcccggactagcgtcgacgaggtcgccgcgatgctgcactgcgattacctgatggagtgggacgtcggaaggctctccggtgggcaacgccgaatcatcgaggtagggctagcactcgtcaatcaaccatcggtcgtcctgctcgacgagcccaccctgggcctggaccccgcaacacgcctgtcgttgtggcaaacggtaaagtcggcacgccgtgagaccggtgctgccttcctcgtcaccacccactacattgacgaggtggccgagcacctgtccaacgtcagcgtgatcaaccacggaaccgtcgtcgccaacggctcgccagcgcacatccgagaaatgttcgcgaccggggaagtaacgctcggcgtggccgaggatacggtggacagtgcggtggacgtgttggctgggaccgcgttcgaggcgcaccccaccgaaaccgtcccggggatcgtggtcaggtccaggcatcccgacgtggacgcggccaagatcatcaccatcctggctggtcatggcatctcggtggactccatatccgtacgcgaggcgaccttggaagaggcgtttctcacgatcacaggcagtcgagacccggagaggcaaatcccatgaacacttgcttcaggcgatatgcggcgatgtcgctgagagcgcggcgtgatttggccctgacattcatccagcccctcgtctacctagccctcttcggaccgctcttcgtcacgacgatgaagatgtcgcagagagctaccgccgctacgggttactccctatacatcacgggcctgtccatccaaatggccatgacgatcggtgccttcgcggggctaaccatcatcctcgaataccgactcggcatcctcgaacggatctggagcacccccctcacggggagcaagatgatggcggggcgaatcgcgcgcgacgtcgttatgatgatgatgccgatactggtcgtcttcatcatcggcctggtgctgggaacacgccccagcccactgggcctggcgacctacttcgtgacagtgctcggcacaggagccacgttcgccggggtctcctacgcggtggcactcagaacgaagagcgaggcagcgctatccgcgatcttcaacctcatcctgctacccatcctcctgctgtcggggatcatgctgcccatgtcgttcgcaccacactggatcgccaccgctgcccacgtgaacccgttgtggtacctggtgcaaggcgcgcggaaccagttcagcgttctagggctcgtggcggcggccccatggagttgggctgtggccatcgtcatgtcagccgctgccttcggctgggcaagccacgaattcaacaagaggcgctgacacaaagaatggtgccgggaacccaggtccccggcaccaccgagtgcactcgcgacgtcaacgcaccgttgcggtcactgcgcaggtcgagcacgaggacgacgagcccgcgctgctgcaggtcgagccgccaggcgcgagcaggtcgacgttagcgtcggcgccgccgaagacggacgtgacggccggctgagaggtgcggatgcggtgctccagcgaggaggtggtggtgagtttcatgggaggtgctcctaggagtgagacgagaacaaaccctagcgataggttagcagtccgcaaccgactccgggaatagtagaagcgcgcatccgtagcggaagaccttagcctgattacagtgaccctgttcgcgtctcaacattattccacacccccgagcagcgaacgacaccgcgatgatgatccgtcgcctctccaccgaagaactccgcgcccacatcgcaccgggccgccgtcccgtgcatcagacctgccgtcaacgtcggccatgaagctgggaaggtggctctcgtctaggagcagacgcgggacgcctcctccaggttgggccggggaagtgtccggttcttgatgtaggtggcggtccctattgatgggcgttgaccgtgggaatgcggtcggcgaagggggtggcgaacccgttgagcgcaggcttccagcgcatgcatcaacgctgtctgccggccaccggcaagcctcacccgcccgtcatggccatcatcgaggtgccggtgaatcctcgacacatgatcccaactcccccggaggggcttccggggctgttcagccaccagatcagccaggcggcgagcccgactctgccacccggaccctgcagagcgtgcctgctgccgtcgtgtcgtgtcgggccagtgggccaccagatcggccacatccgtcttggcccatct

SEQ ID NO: 114 - DNA, 16491 bp, Propionibacterium acnes
gtgttccagtgcctcgcgggcgtgatgttcttcttcggcaccttcttgccacatgcttcgcgcttcagcctcgccatccaagcgaacctggactgtgaacgagtcctcatcgggtccgtcctcattccacgcggcaatgatcccacgggcctcgtctgcgacctgactcaacttcatcgcctgcccgacagccccgagagccggaatctcgaacacccagatattcgcctcagccgagacctcacgatgggcgatcacttcgtaggtcgtctcaccttctactgtcgtgtccattacttccactccttcggaattttcacgcctgctcgctccagctgtgccaggacaccaactgacgtcagctggtgtcctgctggtatcgatacgcgcccggctccgccggggcgtccccagatttcatggcttcccttggcgttccgcagacgggcccatccttgagaacggagcagcttgaggacgtccttagttttctgcggtttcacacatcatagtatagccccacttaacttgtaaactaagcccctgtttacattttagttggtgcatgtgatccctgctcttatgacgtcgcccgacctggcgccttagacatgcactgttcatcctcaaccacactcaccgtcacgggtccgaaggcgaggtctatcaccattcgcatcgatgaagttgaagcaggatcgtccgcatcacgcactgccgatccggacagacgccaccggccgtaccgactgtttacgatctgccaccgcagactgctgccataaccgctatcacctctgatagtacttttagtactatcagaggtgattcaagattctcctgtcgagcagccctacagtcacgaagtcctgcgatcgtcatcgcttaaggcagacggatggccatcggggaccactcgcaaagcaggggcgatcagcaacagtgatgtgccatgagcaagtactggtgcaccggctgtttactccgcccctagataaaccacgggtgcaggggtggacaccacaccatgaccgatgtggtgcccaccccatggctcacaggcaggccctatcgccgggagcactgctgcagatgaggctcagtaacctgccatgtctcacctggggccaaggtgccaagctccccacggaatctcaggcatcggaaaccagcagccgaacttccacagcatgagcgccctacgaaaaagcaggccgccgacggttctcaagaactcgccggcggcctgcatcgccactcgaactgtaaccgtggtccgaccccgtgcacaggtaagctccacactcccaccaggcatggccgaggcagtaccaagttgccgtggcccatcggcagatttggttaaattttgaaaagtcatatagactccttctgtaaatttttaaatctcataggactctcgccatcgccagccagcttcgacaggagtcccgatgtttcaccgagtgaaatatcggcaccgtttgagttgacctaaagctcaaaagatgctagaatccatcttaccccgttaggggcgttttgtcaaacgcccctatattgcgtgtcttcgcgcgtcgtagcgctgatgctgcgcctgtgtcgactatccgtttgtaagtactttcgatgacaccagcagtggctactcatgactggtgcgtgcgggtctaaagcagcagggaaaggaatcgcagtagaagccgcttgattcctatcacccctgatggtactatcagtactaacagagcagggcttactcgatgcgtgagaatcggggacatgctgagcctctcgtaggtcattggcctgctgggcgtcagtgtggcgcggttcgatccagtgaactctatcagctctgttagtactgtcagagttgatatattcgaccccaggaggagcccatgagttacatcgttcgcaccggaaatttggtcgacacccccgagctgcgtgagggagagcatggcccgtacacctacgctcgcgtcatcgtgtccgatcgcattcgccaggaggacggcagctacgtcaacgggccagcgatcgcctacgacgtcttggcgggtggcagccaagccgtgaatctggttgaagccgccaaggcgagcggcaacatccgcatcatgttcgcgggccgttaccgcgtcaccgagtggcggggtgagcagggcactcgtatccagcatgaggtccgagccgacgaagtgagcgtgagcctgctcggtcagagggtgaccgtggagcggcctcgaggtgacgtggcatccaaggagagcacgtcgttctgattgagtccgggggcacggtggtcgccgtggtaaaccgtgcccctgacagtactattgacactattggaggtatcagtgtgactgctcaaattttcgccttgtgcaaccagaagggtggcgtcggaaagtcgacatcgacgtttcatctggcccgtgccgcggtgttgcgtggccagcgtgtgcttgtcgtcgacaacgacccccagggcaacctgacgtctgtcgcggccgccgagcccgtgggggaggatcaggcggggctggccgatgtgctcagcgcgcgtgctccagagaccctccgcgatgtgatcgtgccgggaatctggtctggcctcgatgtcgtgccgacgtctggcatcacgctcggctgggtgcgtgacgaactcgtgatcgccggtgccggccgagaaggccggctgcgggaggccctggccggcgtcgaggacgactacgacgtgatcctgatcgactgtgctccatcgctcgatcagctcacgatcaacggcctggtggccgcccagggtgtcatcgtcgtgacgcactcgaagttgtggagcgccaacggcctcgcccagctgctcgacaccatcgacagcgtgcgcagctactacaacggcgcgctgcgcgtggcgggcatcatcgtcaaccagcacgaggagaacaccatcagcgggaaaacctggctcgacgagctgcatcaggctgccgagtcccggaagctgaccgtgcttgacccgccgatccccaagcgtgtcgtcatcgccgataccgtcgaggccgcgcgcggtctcgacgagtggggaagtgccgaggcggccgcgctcggccagttgtacgcccaccacctgacctgcatcgaaggagccctgtgatgacccgtccagccccccgaaagtcctcattgagcggatcaactccggtcgccccgccggctcagacggcgccggcaccgtctgccgcacctaccccccacaaggccgatgagtcacagacgagcagcaccacgaggaagtggcggcacaaggtgtcgttctaccaggacccggccgacaccgaccgggtgcgcggggcgatcctttacacgatgacgaccgagggcaaccggaacctgagccagttcgtcaacgatgccgtcatggccaaggtggtcgagctggaagtcaagtacaacgatggccagccattccccgctgtgggagcccgaggactaccccagggcggtgcagccgccgccggtgagtagaggaccatcgaccgtcgggggcttcaccatgcccccgaccctcggtcatcctgatcctcttgtcgatggtggtgacagtgggggattcacgcctcgttcagatcagaggaagtctcaccgcgtgattagtactatcaaatctgacagtactaacagagcagatagggttccctaggtcgagctgtatcacgccgacaaccagtgagccagtgatctacgaggggcgcaatatgcacccgatcggtagccgcgaaggcctcgccctgccccgatagtactatcaccactatcaatggtgctagtggtgagtttcttccattgatgacaacagcacagtgctgccgtctgtgtgcgggccaccagcccgcacacagttgccgtcgaggacgttgttcatgctctgtggtggccggtcctgagggcggctcgcaggatctcccggcgctcacggcgacgagcctggtagccaaggtctgcatgttcggcggcgagacgggctttgagggttgcggcttctgcacggcggtggagttggtcgtcgatgagttgggcgcgggccagacgccgcttatgggggttgtcgtgggtgaggggggcgtcgaggctgccgtcgtgggttagggccagggctgctcgttcggcgtcgtcgaggccgatgtggtggacggtcacgggtgcggtggtgacgtcgaggatgtccaggtggatgttgtggccgccgccgggggcttcggggaagtctggtgggctggcctggccggtgtcggggtcataccaggacaggccgatgatctcggcccagggtgggggcgggcagacggctcgcagaagggtgtgggccaggaacgtgttgcgggccatgatgcctccaagggtgaaaagcagtcgagtagcgatgacggcggggtagccgtctgctgggctgaggccgaccgggcccatgtcctcgatgctcttgtgctgcggccataccccaaagctaccaaacagtctttttaatctcaaagatacaaacagtgcttgacatattatctgcagcgaaagatactttcatcatggtggctgatcatgattacgcgactcctgacgatgagtggatgacacctcctcaggtggcccgtgtgattccgaacaccactgctcaggctgtccggcgctgggctgaggagggtcagcttcctggggcgtttcgtactccttctgggcgttggcatattccgtggtcggctgtggtgggcatcatggggtttgatccgcgtgagtccgcatcaccgagtgatcgtcaccagagctgacagagtcgtcgatgagctttcgagtgcagagctgatggcacgacggtctggatacttgtggagatgagagacgaccacatccagtcatggtcggggtacaccgaggggcagattcagcagtgctggcacgatgaggttgcccctgccattgactcgctcatggagcaggtaaggtctgttgccgagactcctgtgccgccgggttcgagattttacggcgatgagcagtgggccaagccttttcatccgtctactgcgatctgcggttcaatgggtccgccagcgatcacttgcacgcgctgaagctcctcgtctgggaagcgaacgtccaccatgtctatgcgccgtacacccttgctcgtgcatctattgaggcatcgtctactgctgtgtggctgttgagcacgaagacgcgcggagaacgtgtgctgcgagccttgcgatggtacgcgcaggattgtcacgactcgtgcaggttcatggatgatgagcagtatcgtgaccacctattgcggcgcattgaggggactgtcgctgcgggaaatctcgactcgcgcgctgctaggaaacggtaccgtgcaaccgatgttgtcgatgaggctgatcagctggttcccggaactctgagggcgtggcgagctttttctggtatggcccattcccgtatgtgggcatccagggggctgctcgacatggaagtgctgtccagtggccaaggaatggttacggcgaaggtgacgagcggatcggcccaaatcctttgggccgtcgtggcagctctgaatgttgctctcagtgccgctcgcttgtggcgtgattcgatgtgctcaccgtttgctgttgcccagtcggtagacgcgatgccagaggcgtttcgccgccctgtttagggtctgatcggggtagtgggtgttcacggggtcccaggttggccatggggcggcttggtgatgtgagttgggttgtgtggcagcctgggtgttgggtgtggcttcgttggccacgaaggcatgctcttccttgtgctgggacttgagtccccagtgctctcccctttgctagtggggggtggggtccccggaggtaggtcctccggggactttttctatgtctgtccgtgccccaggatttcgtatctaggcagtaccaattttgggttagttggaggtttctttggtaatggacagggtgagggtgatgaagaggtggccgtccttggtggcagaaattttctcgaacttcagctgaatgttgttatcagccactatctgttgggcggtgaggtgctcggagagcttctggaatccttcgcggatccacaggttgtaggggttggtgaccgagaccgaagggtatgggtcgaccttcagcgtcaggactggctggtctgggttgagggagttgatcttcaccagtttggggtaccggtcgcactcatgtgtctcttgtgttgggggccagcagtcgggggcccattcctcccagtggtcacgcatctcacgaagtactttcctgcatctcagcctctgcaggagctcgcgcgccaccgatgggagggctgccatgatgagggcaaggactgcgaacccgatgatgtaattgaccgtgtccctcgtcacgccgttcttgccgaggattccgatggcgaacgcgatgacgacaccgcccaggcacaggtgcatggggtcatgctgtgatggtttttcttcttcagcgactggtggggctatagtcatgtgtgccccttagtactaagtgatactggtgggttgcttttccccggtggccgtgtgcaagacggccaccggggttttccttcatgttcctgattttatctgcccggtgtggcgttttcatctttgtgtgggtggttcgcctggggtcttggagtgtggtgacgcggtgatggtcacggtgacggtgactgtggcgcgtggcgggtgaggtggttctttcctggtctggtgtgtggcccaggtgagtgtggtgatgagggccagggtgaggatgatgaccagggtggggagtagtttgtctggccggtgtcgccgggcttggtggcgcggcatgtttttccagggtgtgtctccgaacaggtcgtcgtcggaggggtcgtcgtggttcatagggtggccttggcgatggtggtgggcgagtttggtccaggtgatggtgccgtcggaggcgatgtggcggtcggcgggcagggtgtggacggtccatccggcgtcggtgagggcggtggtgaaggatttcttgatggatcgtttgggtaggtcgatgggggcgtgggtgccgacccagatgcaccggtttttgaggtgggtggcgccgaggtggttcatgtcgcggaccatgttttgggtgagtgtgagggtgtcggggtcccattggacggggatgatgatgtggtctgcgatggtgatggcgtgttgccaggcggcgtcgaggtcgttgtttccggtgtcgaggatgatgacgtggaagcggcttcttagggcggtgatgatgcggtcgaggtcgtcggcggtggggggtgtgatgaggctgttgtggttgtcggtgatggtgggtaggcatgtgatggtggcccagccttctggttgccaggagatgtaggggtcgaggtcgcggggttgggaggcgaatcctgggtgacgggctgcgcgggcgaggtcgatgacggtgttgtcggtgtggcggggtgcgcgggtggagagggtgccgcgtgggttgatttccacgacgacgatgtcgtcgtgtcctgctgtggtggcgagggcttgggcaaggatgacggccagcggggttttgccggtgccgcctttgaggttggcgagggtgatgatgtggtcggtgagttgggcgggtgcggcggtgtggtgagggttggcggtgaggttggcgatggtgaacagggcatcgagatcgtcggtggtgttctgctcggtgggttgggggtcgccggagatgatcgggtcggcgcggcgcggctgccatgccggcctcaccactgtcacgaccaccacgggtctgctggcgctgtgtgggtgtcgtcggcgatgactcacgatcggcagtctcaccatcgtctcggtgatgctcggctagcgctggacccggtcaagttcgggccggctcacccagtggtgatgactcggtcacagaaccgctgccggtcgttatctcggacgtctcgactcctccagtcctgatgggcgttggagccacctacacctactctcagaacgaccccgacctcgtgtggggcgggggcagatgtcacttgggccaatcgagagcccaggtgatggggaaagcagggtgtgatatctgtcctggaaaactgggcagctgctaccgtggattgacggatctccacgaaagaagggaatgcgaccatgcagatcaccgtcaagaccatcaaagatcatcgggttcgcactgtccagaccgccatgagcagcgccttggggattggttcccaggtagacatgctcgcccccggcggttccaccagctcgagttccggttcatgctgctcgtgctcgacctgcgcggtagtggcgcagcctcaagactgaacggctggtcagccccaggggcgtggcgctcatcgcgtcacgccccttctattcgctggacagggtgcgcgagctgaggaacatcgcggtgtgtgcgatgacgaggggcaggagcaagtctgtgcgggttgccaagtagccctgcgcgatggccatcacgctggccccgacggcggcgaagacacctccgatacgtcgcttcatgccgccgaattgcatcaggacgaataggactcccgcggtccacatccctccgggcatgcatctgggaaagatgaaccggaagatgatctcttcacaggagagctggagtactagcagcgtagcccccacggggagactcacctctactgacagacggatcgtcttcatccacccacccgagctggcatcgaccatttcggtggccatgcgcgaccggtggcctcgtgcctctcgctgcgtgtcgatccagccgagcagtccgtggacgctctccgctaggactcctgacgcgacagtctcaccaattcctaagcccacggcgaggaccgcgacgcccccctgcacggcaggctgtgtgacttggtggtcccaccaacccgccggcaggaccatgcgtgcgaggctgcacacgagcaggaggtggagggtcacgacgagcgacatctggaataccgcttgccgttcggcgatggtggcgttgggaaagagcggtaggccggcacgggcagcggcgctcgacagcttccgcaagagcggtttggagacgaagtagtaggcgacgtacagcgccagcgctgtcgcgatgatgatcatcggtctgccaccgagctgacccgccgatagccgtttctgttccaccaatactggctgttgtagatcaggtggcccagaacacaggcccagatcccccagaagatgaacaggatagtccccaaggcggcgagcgggatcttggagaggacctgtccccgtccgaacaccgagtggccgcaagcaaacaagagtgctcccacagcggtgagcgcgagccaggccggggttgctcgcagactgatcaccgggaccccgacccggaagccgacctcttctcctacagcgatgactagcaactgccacagcggcatgttctgaacggagcgcgcgactcgggctcgagtcacccacacgggctgttgagcgctcacatcaccactcaggtaccccggtgaggcacttcgcttagtactggggcccgatgtgcgagcattcgtgatgtgtcgcaggatccggttgtcaagccaagaggccagcagggctccggcgacagtgacgggtagcccgatcagcacgaggccccagccatgcggtgccgagaggtttctggccggcgtgcacgcgaggcaggcaagtgccaacactgccagcactacgacgtagatggtcgcataattcgacttgcgggtgacgttgccgaccatcttggccaaagtcgctggggaccagctgatgagtgcgatggtggtcagcaggaagcaggaccagacagacatccggcgcactcaggggtatgggtgcggctgtgggttttggaaaccgccatatgcggcgtagcgggggtgtgcccgcatgggtgcgctgggcagtgacagggcgagcagcccaggcgcccagagcctgacacagtgcagtcccagcccctggatctctatggtggtgaaatcttcgatgtacaggggtgacacacaggtgatgctgttgaccacgctctttaccagttccgcccccgtgtgggtgtcgtcaggtggcaggtcttcggcttgggcaatggtgcccgcgtcgaatttcgccacaactgattgcgcggcctgatagttcctcgcgtagtaggagacgttcgagtcgaggtcaagcatgtcctccgtggacatactggacgcgtcggcctcggcgtcgaaagacgtccataccgcgagcatccgaaccccgctgcactcgagaaacgccttgtacatggctgcttccagacccgcgtctgcacctaggccgacggcgacgaggggaagttggttgccactaccgaccatcatgcatgccacggtgaaatgcttgagcccgggagtcggaagccagtagaaacgcagttcgtggcttcggcccgctgcacgttccacgagccgctggatgcgctggaggcggggtccttcgacgcggatgcgcacaggtgacgaggctccataccacaggcccatcgcggcatctacctggatcaattcataagccgcggacagcgttgcggcgacgcgtgaagtgtggacggcggtgccggtcgtcacggccgttcccagccacggctcaccgtcgtgccgacgggggttgtaacccaggtaaaagaactgcgccgggatccactcctgccgggaggtcccgacacggggagtcttgacccatgtcatgggcaagtcgtcgcgataggtgtcgaacgcacctccagccactcgttgcgcgaagccgaatgcgcccagatcgagaacttcgtcctcggtccgggcgaggagttcctgacgagtcgcccagcgccgttcgaagggactatggagaatcccggtacccgcgcagtagcgctcgacggcctccgcgtagaccttgatctctgcctcaaactcgttcagccccaccccaccgatgtggtagctacccggcttggggtcgggccggtcaagcagtgcgtgcatccccgtgagttccccaccgttcacccgcacgcgggggccgagcgcggggtgcagcgagtagccgacggaagtcaccagcccgcatagcgggctgtaggtgcgccgcctgagccgggctgcggtctcgacggggtcgctatcctggcgaagcttcatcgctcgccccctgccgccagccactcacggatgtcgtagtacaggtccggagcggtttcaacctgcgctggtgcatcaaaacgggacataggtaggacgtcgttgtaggcgatctccatcgtcggtatgtagaccgacaacactttgttgcgcgtcgtgttgaggccgttgcgggcgatgctgacagcctcatgcgcgacgtgcgcggccaagatcgcgcgcaccgacgctgccacggccggcgctccggcccttacgcggtcggcagcggccacccgcatccaggacaggtagctctgccgttcgcgcaggttcatcgcgacccgctgctcgaaggtccggtaggacgaggtcgcaccagggacgacgtagggacccacgtacaaggccggcccgtctacagctgcgtggagccacgacaggtgggcgcgtcgggcgaacaggtcaagggcgcgcagcatagccgggttgttctgcgccagcgctaccacaaggagtggctgcaggtccggcgccgaacccagcaacgccaacatctgggaggcctcctgctccatgtgcaactcgtcggccgactgctcaagccgcaggcctgcgaagagggtggctgatggctgcgtgtcgtcagcgaggacggtagcctgcagcccctctccctcgagaatctgctggatatcgccggcgaggagcgcgtcgtcgctgaatacccacaccgggcgcgtctctctacctccatccatcttgtcctcaacgttttcgaccagcgcaccgatcgatgctaggtgggccatcacgtcgtcaagggccgcgcgggtcaatccgggcacccgggacacgatctcgggcggctgcagtccttggctcaacaagtccaaggccggccacagggtcccggtggcgtcgtcgtcctccagcgttgtgctctcggcgttccagacgcctcgacggaactccaccctgtccatcgagtaaggcaccatcatgaggcccggtgaaatgtggttggtcactttggctcctgtacagcctaggcttggacgcccacggtcatggtgtgggtcgcggtttggaaaatcccgtcgaggttgagtgcctgattgagttcgtcctcgtagaagcttgaggactcgactgaggcaagaccgagccccgtgcagaccaagttgatctgttgtgcgatcgccccgacttcttgaagggcgaacctcaaacccctggctccgtacttccgcatcgccctccacggcgagatgacgaacaccaagtgcactccggccgcatccgattgctccacggccggctcgccggccatcgaattcctcacgccgcgacagccctcttcaccggtcacgggcaccagtcgatcgatgaccggcgagtagcggtagacgccgcgactcaagccggacacccgttgtgcggacatgaagatagacacgggatacagccctccaccagacgggacagcgcgtacattataccgcacgatatcaccgctcgaacgtgggacatccacgtgccccgtcacaccggcagcacctctcagaaacgcagctacgtcacgcaggtctagggattcgccggtgtagttccgtccgctgcgccggcgggcgatcacttgctcgaggggtgcgcgcaccctgctggacctgggaagttcgatcacatcggcagcgaacgtgtcgcgatccatctgtccgtacgtaacgatcatggggtcaacgaaatagtcgccgaccgagacgttgaactccatatccccccgggcgatgcgcgaggcgagcaagaagtctgcagctgcgttagacagccccggcccatcagtgttgtcgcagcggaactcgtgggtccgaaaccccacaccttccgtgcccgggctctgcgctcgatacgacgtgatcgcagaactagccttccttaaaccgcccggagtagctaccatgaccgtcccctctgaggtctcccgaacacttgcgacaatagcagcatgtgggggcagccgccagaggcgggcatccttgtctcgacaaccattgacctccggattcgatatgtgcataatcatagtcgtgccaacacgaaacgtgtacgtctcggaagacgacctagacctgttcgccgaagccaccgagatcgctggaggcctgtccgcagcggtgttggaggccttgcgcagctacgtagacaggcaccatcgcgcggccggcggattcgacgagatcgagctggagctgcagaacgacggtatcgaccaccgtgtcaccttcatgggtcgccgcctgatacacatccgccgtccagatcccgagggaacccgcatagacactgtctacttgaccgccaaacaccaattcgccgttgccaccaaaatccaacgacggctgccagactggacgaccggccacgagcacatctggtccgacccggagacctggaatcgggagttctggatcgcaggtgacaagacgatggccgtgtatcccagccttgacaaactccgcgaagctgaccccaatgtggccgaacgcgccgaggccgcggtcaaaatcccgccgttcgaggtcctggacatctgatgacagaatcatcatcttcccggcggcaattggcaatgccggtgctgtcagtcacggatctagccaagaaatacgtggttcatggcggctacgaggtcccggcactcaacggtgtctcgtttgacctgcacccgggagagatgctgggtttgttcgggccaaacggtgctggaaagacgacgctggtcaggatcatcgcgggcctcttatcggcagattctggagacgtccactggggatcggatcaaggtcgggccaggttaggctacgtgtcccaaaagggtggactgcagtacgggctcacgtgccgggaagagatggtcttccacgcacaatgcttcggccagtccgccaagcaggcccggactagcgtcgacgaggtcgccgcgatgctgcactgcgattacctgatggagtgggacgtcggaaggctctccggtgggcaacgccgaatcatcgaggtagggctagcactcgtcaatcaaccatcggtcgtcctgctcgacgagcccaccctgggcctggaccccgcaacacgcctgtcgttgtggcaaacggtaaagtcggcacgccgtgagaccggtgctgccttcctcgtcaccacccactacattgacgaggtggccgagcacctgtccaacgtcagcgtgatcaaccacggaaccgtcgtcgccaacggctcgccagcgcacatccgagaaatgttcgcgaccggggaagtaacgctcggcgtggccgaggatacggtggacagtgcggtggacgtgttggctgggaccgcgttcgaggcgcaccccaccgaaaccgtcccggggatcgtggtcaggtccaggcatcccgacgtggacgcggccaagatcatcaccatcctggctggtcatggcatctcggtggactccatatccgtacgcgaggcgaccttggaagaggcgtttctcacgatcacaggcagtcgagacccggagaggcaaatcccatgaacacttgcttcaggcgatatgcggcgatgtcgctgagagcgcggcgtgatttggccctgacattcatccagcccctcgtctacctagccctcttcggaccgctcttcgtcacgacgatgaagatgtcgcagagagctaccgccgctacgggttactccctatacatcacgggcctgtccatccaaatggccatgacgatcggtgccttcgcggggctaaccatcatcctcgaataccgactcggcatcctcgaacggatctggagcacccccctcacggggagcaagatgatggcggggcgaatcgcgcgcgacgtcgttatgatgatgatgccgatactggtcgtcttcatcatcggcctggtgctgggaacacgccccagcccactgggcctggcgacctacttcgtgacagtgctcggcacaggagccacgttcgccggggtctcctacgcggtggcactcagaacgaagagcgaggcagcgctatccgcgatcttcaacctcatcctgctacccatcctcctgctgtcggggatcatgctgcccatgtcgttcgcaccacactggatcgccaccgctgcccacgtgaacccgttgtggtacctggtgcaaggcgcgcggaaccagttcagcgttctagggctcgtggcggcggccccatggagttgggctgtggccatcgtcatgtcagccgctgccttcggctgggcaagccacgaattcaacaagaggcgctgacacaaagaatggtgccgggaacccaggtccccggcaccaccgagtgcactcgcgacgtcaacgcaccgttgcggtcactgcgcaggtcgagcacgaggacgacgagcccgcgctgctgcaggtcgagccgccaggcgcgagcaggtcgacgttagcgtcggcgccgccgaagacggacgtgacggccggctgagaggtgcggatgcggtgctccagcgaggaggtggtggtgagtttcatgggaggtgctcctaggagtgagacgagaacaaaccctagcgataggttagcagtccgcaaccgactccgggaatagtagaagcgcgcatccgtagcggaagaccttagcctgattacagtgaccctgttcgcgtctcaacattattccacacccccgagcagcgaacgacaccgcgatgatgatccgtcgcctctccaccgaagaactccgcgcccacatcgcaccgggccgccgtcccgtgcatcagacctgccgtcaacgtcggccatgaagctgggaaggtggctctcgtctaggagcagacgcgggacgcctcctccaggttgggccggggaagtgtccggttcttgatgtaggtggcggtccctattgatgggcgttgaccgtgggaatgcggtcggcgaagggggtggcgaacccgttgagcgcaggcttccagcgcatgcatcaacgctgtctgccggccaccggcaagcctcacccgcccgtcatggccatcatcgaggtgccggtgaatcctcgacacatgatcccaactcccccggaggggcttccggggctgttcagccaccagatcagccaggcggcgagcccgactctgccacccggaccctgcagagcgtgcctgctgccgtcgtgtcgtgtcgggccagtgggccaccagatcggccacatccgtcttggcccat

SEQ ID NO: 115 - DNA, 13424 bp, Propionibacterium acnes
ccgcgcggggtctcgacgagtggggaagtgccgaggcggccgcgctcggccagttgtacgcccaccacctgacctgcatcgaaggagccctgtgatgacccgtccagccccccgaaagtcctcattgagcggatcaactccggtcgccccgccggctcagacggcgccggcaccgtctgccgcacctaccccccacaaggccgatgagtcacagacgagcagcaccacgaggaagtggcggcacaaggtgtcgttctaccaggacccggccgacaccgaccgggtgcgcggggcgatcctttacacgatgacgaccgagggcaaccggaacctgagccagttcgtcaacgatgccgtcatggccaaggtggtcgagctggaagtcaagtacaacgatggccagccattccccgctgtgggagcccgaggactaccccagggcggtgcagccgccgccggtgagtagaggaccatcgaccgtcgggggcttcaccatgcccccgaccctcggtcatcctgatcctcttgtcgatggtggtgacagtgggggattcacgcctcgttcagatcagaggaagtctcaccgcgtgattagtactatcaaatctgacagtactaacagagcagatagggttccctaggtcgagctgtatcacgccgacaaccagtgagccagtgatctacgaggggcgcaatatgcacccgatcggtagccgcgaaggcctcgccctgccccgatagtactatcaccactatcaatggtgctagtggtgagtttcttccattgatgacaacagcacagtgctgccgtctgtgtgcgggccaccagcccgcacacagttgccgtcgaggacgttgttcatgctctgtggtggccggtcctgagggcggctcgcaggatctcccggcgctcacggcgacgagcctggtagccaaggtctgcatgttcggcggcgagacgggctttgagggttgcggcttctgcacggcggtggagttggtcgtcgatgagttgggcgcgggccagacgccgcttatgggggttgtcgtgggtgaggggggcgtcgaggctgccgtcgtgggttagggccagggctgctcgttcggcgtcgtcgaggccgatgtggtggacggtcacgggtgcggtggtgacgtcgaggatgtccaggtggatgttgtggccgccgccgggggcttcggggaagtctggtgggctggcctggccggtgtcggggtcataccaggacaggccgatgatctcggcccagggtgggggcgggcagacggctcgcagaagggtgtgggccaggaacgtgttgcgggccatgatgcctccaagggtgaaaagcagtcgagtagcgatgacggcggggtagccgtctgctgggctgaggccgaccgggcccatgtcctcgatgctcttgtgctgcggccataccccaaagctaccaaacagtctttttaatctcaaagatacaaacagtgcttgacatattatctgcagcgaaagatactttcatcatggtggctgatcatgattacgcgactcctgacgatgagtggatgacacctcctcaggtggcccgtgtgattccgaacaccactgctcaggctgtccggcgctgggctgaggagggtcagcttcctggggcgtttcgtactccttctgggcgttggcatattccgtggtcggctgtggtgggcatcatggggtttgatccgcgtgagtccgcatcaccgagtgatcgtcaccagagctgacagagtcgtcgatgagctttcgagtgcagagctgatggcacgacggtctggatacttgtggagatgagagacgaccacatccagtcatggtcggggtacaccgaggggcagattcagcagtgctggcacgatgaggttgcccctgccattgactcgctcatggagcaggtaaggtctgttgccgagactcctgtgccgccgggttcgagattttacggcgatgagcagtgggccaagccttttcatccgtctactgcgatctgcggttcaatgggtccgccagcgatcacttgcacgcgctgaagctcctcgtctgggaagcgaacgtccaccatgtctatgcgccgtacacccttgctcgtgcatctattgaggcatcgtctactgctgtgtggctgttgagcacgaagacgcgcggagaacgtgtgctgcgagccttgcgatggtacgcgcaggattgtcacgactcgtgcaggttcatggatgatgagcagtatcgtgaccacctattgcggcgcattgaggggactgtcgctgcgggaaatctcgactcgcgcgctgctaggaaacggtaccgtgcaaccgatgttgtcgatgaggctgatcagctggttcccggaactctgagggcgtggcgagctttttctggtatggcccattcccgtatgtgggcatccagggggctgctcgacatggaagtgctgtccagtggccaaggaatggttacggcgaaggtgacgagcggatcggcccaaatcctttgggccgtcgtggcagctctgaatgttgctctcagtgccgctcgcttgtggcgtgattcgatgtgctcaccgtttgctgttgcccagtcggtagacgcgatgccagaggcgtttcgccgccctgtttagggtctgatcggggtagtgggtgttcacggggtcccaggttggccatggggcggcttggtgatgtgagttgggttgtgtggcagcctgggtgttgggtgtggcttcgttggccacgaaggcatgctcttccttgtgctgggacttgagtccccagtgctctcccctttgctagtggggggtggggtccccggaggtaggtcctccggggactttttctatgtctgtccgtgccccaggatttcgtatctaggcagtaccaattttgggttagttggaggtttctttggtaatggacagggtgagggtgatgaagaggtggccgtccttggtggcagaaattttctcgaacttcagctgaatgttgttatcagccactatctgttgggcggtgaggtgctcggagagcttctggaatccttcgcggatccacaggttgtaggggttggtgaccgagaccgaagggtatgggtcgaccttcagcgtcaggactggctggtctgggttgagggagttgatcttcaccagtttggggtaccggtcgcactcatgtgtctcttgtgttgggggccagcagtcgggggcccattcctcccagtggtcacgcatctcacgaagtactttcctgcatctcagcctctgcaggagctcgcgcgccaccgatgggagggctgccatgatgagggcaaggactgcgaacccgatgatgtaattgaccgtgtccctcgtcacgccgttcttgccgaggattccgatggcgaacgcgatgacgacaccgcccaggcacaggtgcatggggtcatgctgtgatggtttttcttcttcagcgactggtggggctatagtcatgtgtgccccttagtactaagtgatactggtgggttgcttttccccggtggccgtgtgcaagacggccaccggggttttccttcatgttcctgattttatctgcccggtgtggcgttttcatctttgtgtgggtggttcgcctggggtcttggagtgtggtgacgcggtgatggtcacggtgacggtgactgtggcgcgtggcgggtgaggtggttctttcctggtctggtgtgtggcccaggtgagtgtggtgatgagggccagggtgaggatgatgaccagggtggggagtagtttgtctggccggtgtcgccgggcttggtggcgcggcatgtttttccagggtgtgtctccgaacaggtcgtcgtcggaggggtcgtcgtggttcatagggtggccttggcgatggtggtgggcgagtttggtccaggtgatggtgccgtcggaggcgatgtggcggtcggcgggcagggtgtggacggtccatccggcgtcggtgagggcggtggtgaaggatttcttgatggatcgtttgggtaggtcgatgggggcgtgggtgccgacccagatgcaccggtttttgaggtgggtggcgccgaggtggttcatgtcgcggaccatgttttgggtgagtgtgagggtgtcggggtcccattggacggggatgatgatgtggtctgcgatggtgatggcgtgttgccaggcggcgtcgaggtcgttgtttccggtgtcgaggatgatgacgtggaagcggcttcttagggcggtgatgatgcggtcgaggtcgtcggcggtggggggtgtgatgaggctgttgtggttgtcggtgatggtgggtaggcatgtgatggtggcccagccttctggttgccaggagatgtaggggccgaggtcgcggggttgggaggcgaatcctgggtgacgggctgcgcgggcgaggtcgatgacggtgttgtcggtgtggcggggtgcgcgggtggagagggtgccgcgtgggttgatttccacgacgacgatgtcgtcgtgtcctgctgtggtggcgagggcttgggcaaggatgacggccagcggggttttgccggtgccgcctttgaggttggcgagggtgatgatgtggtcggtgagttgggcgggtgcggcggtgtggtgagggttggcggtgaggttggcgatggtgaacagggcatcgagatcgtcggtggtgttctgctcggtgggttgggggtcgccggagatgatcgggtcggcgcggcgcggctgccatgccggcctcaccactgtcacgaccaccacgggtctgctggcgctgtgtgggtgtcgtcggcgatgactcacgatcggcagtctcaccatcgtctcggtgatgctcggctagcgctggacccggtcaagttcgggccggctcacccagtggtgatgactcggtcacagaaccgctgccggtcgttatctcggacgtctcgactcctccagtcctgatgggcgttggagccacctacacctactctcagaacgaccccgacctcgtgtggggcgggggcagatgtcacttgggccaatcgagagcccaggtgatggggaaagcaggggtgtgatatctgtcctggaaaactgggcagctgctaccgtggattgacggatctccacgaaagaagggaatgcgaccatgcagatcaccgtcaagaccatcaaagatcatcgggttcgcactgtccagaccgccatgagcagcgccttggggattggttcccaggtagacatgctcgcccccggcggttccaccagctcgagttccggttcatgctgctcgtgctcgacctgcgcggtagtggcgcagcctcaagactgaacggctggtcagccccaggggcgtggcgctcatcgcgtcacgccccttctattcgctggacagggtgcgcgagctgaggaacatcgcggtgtgtgcgatgacgaggggcaggagcaagtctgtgcgggttgccaagtagccctgcgcgatggccatcacgctggccccgacggcggcgaagacacctccgatacgtcgcttcatgccgccgaattgcatcaggacgaataggactcccgcggtccacatccctccgggcatgcatctgggaaagatgaaccggaagatgatctcttcacaggagagctggagtactagcagcgtagcccccacggggagactcacctctactgacagacggatcgtcttcatccacccacccgagctggcatcgaccatttcggtggccatgcgcgaccggtggcctcgtgcctctcgctgcgtgtcgatccagccgagcagtccgtggacgctctccgctaggactcctgacgcgacagtctcaccaattcctaagcccacggcgaggaccgcgacgcccccctgcacggcaggctgtgtgacttggtggtcccaccaacccgccggcaggaccatgcgtgcgaggctgcacacgagcaggaggtggagggtcacgacgagcgacatctggaataccgcttgccgttcggcgatggtggcgttgggaaagagcggtaggccggcacgggcagcggcgctcgacagcttccgcaagagcggtttggagacgaagtagtaggcgacgtacagcgccagcgctgtcgcgatgatgatcatcggtctgccaccgagctgacccgccgatagccgtttctgttccaccaatactggctgttgtagatcaggtggcccagaacacaggcccagatcccccagaagatgaacaggatagtccccaaggcggcgagcgggatcttggagaggacctgtccccgtccgaacaccgagtggccgcaagcaaacaagagtgctcccacagcggtgagcgcgagccaggccggggttgctcgcagactgatcaccgggaccccgacccggaagccgacctcttctcctacagcgatgactagcaactgccacagcggcatgttctgaacggagcgcgcgactcgggctcgagtcacccacacgggctgttgagcgctcacatcaccactcaggtaccccggtgaggcacttcgcttagtactggggcccgatgtgcgagcattcgtgatgtgtcgcaggatccggttgtcaagccaagaggccagcagggctccggcgacagtgacgggtagcccgatcagcacgaggccccagccatgcggtgccgagaggtttctggccggcgtgcacgcgaggcaggcaaatgccatcactgccagcactacgacgtagatggtcgcataattcgacttgcgggtgacgttgccgaccatcttggccaaagtcgctggggaccagctgatgagtgcgatggtggtcagcaggaagcaggaccagacagacatccggcgcactcaggggtatgggtgcggctgtgggttttggaaaccgccatatgcggcgtagcgggggtgtgcccgcatgggtgcgctgggcagtgacagggcgagcagcccaggcgcccagagcctgacacagtgcagtcccagcccctggatctctatggtggtgaaatcttcgatgtacaggggtgacacacaggtgatgctgttgaccacgctctttaccagttccgcccccgtgtgggtgtcgtcaggtggcaggtcttcggcttgggcaatggtgcccgcgtcgaatttcgccacaactgattgcgcggcctgatagttcctcgcgtagtaggagacgttcgagtcgaggtcaagcatgtcctccgtggacatactggacgcgtcggcctcggcgtcgaaagacgtccataccgcgagcatccgaaccccgctgcactcgagaaacgccttgtacatggctgcttccagacccgcgtctgcacctaggccgacggcgacgaggggaagttggttgccactaccgaccatcatgcatgccacggtgaaatgcttgagcccgggagtcggaagccagtagaaacgcagttcgtggcttcggcccgctgcacgttccacgagccgctggatgcgctggaggcggggtccttcgacgcggatgcgcacaggtgacgaggctccataccacaggcccatcgcggcatctacctggatcaattcataagccgcggacagcgttgcggcgacgcgtgaagtgtggacggcggtgccggtcgtcacggccgttcccagccacggctcaccgtcgtgccgacgggggttgtaacccaggtaaaagaactgcgccgggatccactcctgccgggaggtcccgacacggggagtcttgacccatgtcatgggcaagtcgtcgcgataggtgtcgaacgcacctccagccactcgttgcgcgaagccgaatgcgcccagatcgagaacttcgtcctcggtccgggcgaggagttcctgacgagtcgcccagcgccgttcgaagggactatggagaatcccggtacccgcgcagtagcgctcgacggcctccgcgtagaccttgatctctgcctcaaactcgttcagccccaccccaccgatgtggtagctacccggcttggggtcgggccggtcaagcagtgcgtgcatccccgtgagttccccaccgttcacccgcacgcgggggccgagcgcggggtgcagcgagtagccgacggaagtcaccagcccgcatagcgggctgtaggtgcgccgcctgagccgggctgcggtctcgacggggtcgctatcctggcgaagcttcatcgctcgccccctgccgccagccactcacggatgtcgtagtacaggtccggagcggtttcaacctgcgctggtgcatcaaaacgggacataggtaggacgtcgttgtaggcgatctccatcgtcggtatgtagaccgacaacactttgttgcgcgtcgtgttgaggccgttgcgggcgatgctgacagcctcatgcgcgacgtgcgcggccaagatcgcgcgcaccgacgctgccacggccggcgctccggcccttacgcggtcggcagcggccacccgcatccaggacaggtagctctgccgttcgcgcaggttcatcgcgacccgctgctcgaaggtccggtaggacgaggtcgcaccagggacgacgtagggacccacgtacaaggccggcccgtctacagctgcgtggagccacgacaggtgggcgcgtcgggcgaacaggtcaagggcgcgcagcatagccgggttgttctgcgccagcgctaccacaaggagtggctgcaggtccggcgccgaacccagcaacgccaacatctgggaggcctcctgctccatgtgcaactcgtcggccgactgctcaagccgcaggcctgcgaagagggtggctgatggctgcgtgtcgtcagcgaggacggtagcctgcagcccctctccctcgagaatctgctggatatcgccggcgaggagcgcgtcgtcgctgaatacccacaccgggcgcgtctctctacctccatccatcttgtcctcaacgttttcgaccagcgcaccgatcgatgctaggtgggccatcacgtcgtcaagggccgcgcgggtcaatccgggcacccgggacacgatctcgggcggctgcagtccttggctcaacaagtccaaggccggccacagggtcccggtggcgtcgtcgtcctccagcgttgtgctctcggcgttccagacgcctcgacggaactccaccctgtccatcgagtaaggcaccatcatgaggcccggtgaaatgtggttggtcactttggctcctgtacagcctaggcttggacgcccacggtcatggtgtgggtcgcggtttggaaaatcccgtcgaggttgagtgcctgattgagttcgtcctcgtagaagcttgaggactcgactgaggcaagaccgagccccgtgcagaccaagttgatctgttgtgcgatcgccccgacttcttgaagggcgaacctcaaacccctggctccgtacttccgcatcgccctccacggcgagatgacgaacaccaagtgcactccggccgcatccgattgctccacggccggctcgccggccatcgaattcctcacgccgcgacagccctcttcaccggtcacgggcaccagtcgatcgatgaccggcgagtagcggtagacgccgcgactcaagccggacacccgttgtgcggacatgaagatagacacgggatacagccctccaccagacgggacagcgcgtacattataccgcacgatatcaccgctcgaacgtgggacatccacgtgccccgtcacaccggcagcacctctcagaaacgcagctacgtcacgcaggtctagggattcgccggtgtagttccgtccgctgcgccggcgggcgatcacttgctcgaggggtgcgcgcaccctgctggacctgggaagttcgatcacatcggcagcgaacgtgtcgcgatccatctgtccgtacgtaacgatcatggggtcaacgaaatagtcgccgaccgagacgttgaactccatatccccccgggcgatgcgcgaggcgagcaagaagtctgcagctgcgttagacagccccggcccatcagtgttgtcgcagcggaactcgtgggtccgaaaccccacaccttccgtgcccgggctctgcgctcgatacgacgtgatcgcagaactagccttccttaaaccgcccggagtagctaccatgaccgtcccctctgaggtctcccgaacacttgcgacaatagcagcatgtgggggcagccgccagaggcgggcatccttgtctcgacaaccattgacctccggattcgatatgtgcataatcatagtcgtgccaacacgaaacgtgtacgtctcggaagacgacctagacctgttcgccgaagccaccgagatcgctggaggcctgtccgcagcggtgttggaggccttgcgcagctacgtagacaggcaccatcgcgcggccggcggattcgacgagatcgagctggagctgcagaacgacggtatcgaccaccgtgtcaccttcatgggtcgccgcctgatacacatccgccgtccagatcccgagggaacccgcatagacactgtctacttgaccgccaaacaccaattcgccgttgccaccaaaatccaacgacggctgccagactggacggccggccacgagcacatctggtccgacccggagacctggaatcgggagttctggatcgcaggtgacaagacgatggccgtgtatcccagccttgacaaactccgcgaagctgaccccaatgtggccgaacgcgccgaggccgcggtcaaaatcccgccgttcgaggtcctggacatctgatgacagaatcatcatcttcccggcggcaattggcaatgccggtgctgtcagtcacggatctagccaagaaatacgtggttcatggcggctacgaggtcccggcactcaacggtgtctcgtttgacctgcacccgggagagatgctgggtttgttcgggccaaacggtgctggaaagacgacgctggtcaggatcatcgcgggcctcttatcggcagattctggagacgtccactggggatcggatcaaggtcgggccaggttaggctacgtgtcccaaaagggtggactgcagtacgggctcacgtgccgggaagagatggtcttccacgcacaatgcttcggccagtccgccaagcaggcccggactagcgtcgacgaggtcgccgcgatgctgcactgcgattacctgatggagtgggacgtcggaaggctctccggtgggcaacgccgaatcatcgaggtagggctagcactcgtcaatcaaccatcggtcgtcctgctcgacgagcccaccctgggcctggaccccgcaacacgcctgtcgttgtggcaaacggtaaagtcggcacgccgtgagaccggtgctgccttcctcgtcaccacccactacattgacgaggtggccgagcacctgtccaacgtcagcgtgatcaaccacggaaccgtcgtcgccaacggctcgccagcgcacatccgagaaatgttcgcgaccggggaagtaacgctcggcgtggccgaggatacggtggacagtgcggtggacgtgttggctgggaccgcgttcgaggcgcaccccaccgaaaccgtcccggggatcgtggtcaggtccaggcatcccgacgtggacgcggccaagatcatcaccatcctggctggtcatggcatctcggtggactccatatccgtacgcgaggcgaccttggaagaggcgtttctcacgatcacaggcagtcgagacccggagaggcaaatcccatgaacacttgcttcaggcgatatgcggcgatgtcgctgagagcgcggcgtgatttggccctgacattcatccagcccctcgtctacctagccctcttcggaccgctcttcgtcacgacgatgaagatgtcgcagagagctaccgccgctacgggttactccctatacatcacgggcctgtccatccaaatggccatgacgatcggtgccttcgcggggctaaccatcatcctcgaataccgactcggcatcctcgaacggatctggagcacccccctcacggggagcaagatgatggcggggcgaatcgcgcgcgacgtcgttatgatgatgatgccgatactggtcgtcttcatcatcggcctggtgctgggaacacgccccagcccactgggcctggcgacctacttcgtgacagtgctcggcacaggagccacgttcgccggggtctcctacgcggtggcactcagaacgaagagcgaggcagcgctatccgcgatcttcaacctcatcctgctacccatcctcctgctgtcggggatcatgctgcccatgtcgttcgcaccacactggatcgccaccgctgcccacgtgaacccgttgtggtacctggtgcaaggcgcgcggaaccagttcagcgttctagggctcgtggcggcggccccatggagttgggctgtggccatcgtcatgtcagccgctgccttcggctgggcaagccacgaattcaacaagaggcgctgacacaaagaatggtgccgggaacccaggtccccggcaccaccgagtgcactcgcgacgtcaacgcaccgttgcggtcactgcgcaggtcgagcacgaggacgacgagcccgcgctgctgcaggtcgagccgccaggcgcgagcaggtcgacgttagcgtcggcgccgccgaagacggacgtgacggccggctgagaggtgcggatgcggtgctccagcgaggaggtggtggtgagtttcatgggaggtgctcctaggagtgagacgagaacaaaccctagcgataggttagcagtccgcaaccgactccgggaatagtagaagcgcgcatccgtagcggaagaccttagcctgattacagtgaccctgttcgcgtctcaacattattccacacccccgagcagcgaacgacaccgcgatgatgatccgtcgcctctccaccgaagaactccgcgcccacatcgcaccgggccgccgtcccgtgcatcagacctgccgtcaacgtcggccatgaagctgggaaggtggctctcgtctaggagcagacgcgggacgcctcctccaggttgggccggggaagtgtccggttcttgatgtaggtggcggtccctattgatgggcgttgaccgtgggaatgcggtcggcgaagggggtggcgaacccgttgagcgcaggcttccagcgcatgcatcaacgctgtctgccggccaccggcaagcctcacccgcccgtcatggccatcatcgaggtgccggtgaatcctcgacacatgatcccaactcccccggaggggcttccggggctgttcagccaccagatcagccaggcggcgagcccgactctgccacccggaccctgcagagcgtgcctgctgccgtcgtgtcgtgtcgggccagtgggccaccagatcggccacatccgtcttggcccat

SEQ ID NO: 116 - DNA, 12654 bp, Propionibacterium acnes
gtgagtttcttccattgatgacaacagcacggtgctgccgtctgtgtgcggccccccaccccgcacacagttgccgtcgaggacgttgttcatgctctgtggtggccggtcctgagggcggctcgcaggatctcccggcgctcacggcgacgagcctggtagccaaggtctgcatgttcggcggcgagacgggctttgagggttgcggcttctgcacggcggtggagttggtcgtcgatgagttgggcgcgggccagacgccgcttatgggggttgtcgtgggtgaggggggcgtcgaggctgccgtcgtgggttagggccagggctgctcgttcggcgtcgtcgaggccgatgtggtggacggtcacgggtgcggtggtgacgtcgaggatgtccaggtggatgttgtggccgccgccgggggcttcggggaagtctggtgggctggcctggccggtgtcggggtcataccaggacaggccgatgatctcggcccagggtgggggcgggcagacggctcgcagaagggtgtgggccaggaacgtgttgcgggccatgatgcctccaagggtgaaaagcagtcgagtagcgatgacggcggggtagccgtctgctgggctgaggccgaccgggcccatgtcctcgatgctcttgtgctgcggccataccccaaagctaccaaacagtctttttaatctcaaagatacaaacagtgcttgacatattatctgcagcgaaagatactttcatcatggtggctgatcatgattacgcgactcctgacgatgagtggatgacacctcctcaggtggcccgtgtgattccgaacaccactgctcaggctgtccggcgctgggctgaggagggtcagcttcctggggcgtttcgtactccttctgggcgttggcatattccgtggtcggctgtggtgggcatcatggggtttgatccgcgtgagtccgcatcaccgagtgatcgtcaccagagctgacagagtcgtcgatgagctttcgagtgcagagctgatggcacgacggtctggatacttgtggagatgagagacgaccacatccagtcatggtcggggtacaccgaggggcagattcagcagtgctggcacgatgaggttgcccctgccattgactcgctcatggagcaggtaaggtctgttgccgagactcctgtgccgccgggttcgagattttacggcgatgagcagtgggccaagccttttcatccgtctactgcgatctgcggttcaatgggtccgccagcgatcacttgcacgcgctgaagctcctcgtctgggaagcgaacgtccaccatgtctatgcgccgtacacccttgctcgtgcatctattgaggcatcgtctactgctgtgtggctgttgagcacgaagacgcgcggagaacgtgtgctgcgagccttgcgatggtacgcgcaggattgtcacgactcgtgcaggttcatggatgatgagcagtatcgtgaccacctattgcggcgcattgaggggactgtcgctgcgggaaatctcgactcgcgcgctgctaggaaacggtaccgtgcaaccgatgttgtcgatgaggctgatcagctggttcccggaactctgagggcgtggcgagctttttctggtatggcccattcccgtatgtgggcatccagggggctgctcgacatggaagtgctgtccagtggccaaggaatggttacggcgaaggtgacgagcggatcggcccaaatcctttgggccgtcgtggcagctctgaatgttgctctcagtgccgctcgcttgtggcgtgattcgatgtgctcaccgtttgctgttgcccagtcggtagacgcgatgccagaggcgtttcgccgccctgtttagggtctgatcggggtagtgggtgttcacggggtcccaggttggccatggggcggcttggtgatgtgagttgggttgtgtggcagcctgggtgttgggtgtggcttcgttggccacgaaggcatgctcttccttgtgctgggacttgagtccccagtgctctcccctttgctagtggggggtggggtccccggaggtaggtcctccggggactttttctatgtctgtccgtgccccaggatttcgtatctaggcagtaccaattttgggttagttggaggtttctttggtaatggacagggtgagggtgatgaagaggtggccgtccttggtggcagaaattttctcgaacttcagctgaatgttgttatcagccactatctgttgggcggtgaggtgctcggagagcttctggaatccttcgcggatccacaggttgtaggggttggtgaccgagaccgaagggtatgggtcgaccttcagcgtcaggactggctggtctgggttgagggagttgatcttcaccagtttggggtaccggtcgcactcatgtgtctcttgtgttgggggccagcagtcgggggcccattcctcccagtggtcacgcatctcacgaagtactttcctgcatctcagcctctgcaggagctcgcgcgccaccgatgggagggctgccatgatgagggcaaggactgcgaacccgatgatgtaattgaccgtgtccctcgtcacgccgttcttgccgaggattccgatggcgaacgcgatgacgacaccgcccaggcacaggtgcatggggtcatgctgtgatggtttttcttcttcagcgactggtggggctatagtcatgtgtgccccttagtactaagtgatactggtgggttgcttttccccggtggccgtgtgcaagacggccaccggggttttccttcatgttcctgattttatctgcccggtgtggcgttttcatctttgtgtgggtggttcgcctggggtcttggagtgtggtgacgcggtgatggtcacggtgacggtgactgtggcgcgtggcgggtgaggtggttctttcctggtctggtgtgtggcccaggtgagtgtggtgatgagggccagggtgaggatgatgaccagggtggggagtagtttgtctggccggtgtcgccgggcttggtggcgcggcatgtttttccagggtgtgtctccgaacaggtcgtcgtcggaggggtcgtcgtggttcatagggtggccttggcgatggtggtgggcgagtttggtccaggtgatggtgccgtcggaggcgatgtggcggtcggcgggcagggtgtggacggtccatccggcgtcggtgagggcggtggtgaaggatttcttgatggatcgtttgggtaggtcgatgggggcgtgggtgccgacccagatgcaccggtttttgaggtgggtggcgccgaggtggttcatgtcgcggaccatgttttgggtgagtgtgagggtgtcggggtcccattggacggggatgatgatgtggtctgcgatggtgatggcgtgttgccaggcggcgtcgaggtcgttgtttccggtgtcgaggatgatgacgtggaagcggcttcttagggcggtgatgatgcggtcgaggtcgtcggcggtggggggtgtgatgaggctgttgtggttgtcggtgatggtgggtaggcatgtgatggtggcccagccttctggttgccaggagatgtaggggtcgaggtcgcggggttgggaggcgaatcctgggtgacgggctgcgcgggcgaggtcgatgacggtgttgtcggtgtggcggggtgcgcgggtggagagggtgccgcgtgggttgatttccacgacgacgatgtcgtcgtgtcctgctgtggtggcgagggcttgggcaaggatgacggccagcggggttttgccggtgccgcctttgaggttggcgagggtgatgatgtggtcggtgagttgggcgggtgcggcggtgtggtgagggttggcggtgaggttggcgatggtgaacagggcatcgagatcgtcggtggtgttctgctcggtgggttgggggtcgccggagatgatcgggtcggcgcggcgcggctgccatgccggcctcaccactgtcacgaccaccacgggtctgctggcgctgtgtgggtgtcgtcggcgatgactcacgatcggcagtctcaccatcgtctcggtgatgctcggctagcgctggacccggtcaagttcgggccggctcacccagtggtgatgactcggtcacagaaccgctgccggtcgttatctcggacgtctcgactcctccagtcctgatgggcgttggagccacctacacctactctcagaacgaccccgacctcgtgtggggcgggggcagatgtcacttgggccaatcgagagcccaggtgatggggaaagcaggggtgtgatatctgtcctggaaaactgggcagctgctaccgtggattgacggatctccacgaaagaagggaatgcgaccatgcagatcaccgtcaagaccatcaaagatcatcgggttcgcactgtccagaccgccatgagcagcgccttggggattggttcccaggtagacatgctcgcccccggcggttccaccagctcgagttccggttcatgctgctcgtgctcgacctgcgcggtagtggcgcagcctcaagactgaacggctggtcagccccaggggcgtggcgctcatcgcgtcacgccccttctattcgctggacagggtgcgcgagctgaggaacatcgcggtgtgtgcgatgacgaggggcaggagcaagtctgtgcgggttgccaagtagccctgcgcgatggccatcacgctggccccgacggcggcgaagacacctccgatacgtcgcttcatgccgccgaattgcatcaggacgaataggactcccgcggtccacatccctccgggcatgcatctgggaaagatgaaccggaagatgatctcttcacaggagagctggagtactagcagcgtagcccccacggggagactcacctctactgacagacggatcgtcttcatccacccacccgagctggcatcgaccatttcggtggccatgcgcgaccggtggcctcgtgcctctcgctgcgtgtcgatccagccgagcagtccgtggacgctctccgctaggactcctgacgcgacagtctcaccaattcctaagcccacggcgaggaccgcgacgcccccctgcacggcaggctgtgtgacttggtggtcccaccaacccgccggcaggaccatgcgtgcgaggctgcacacgagcaggaggtggagggtcacgacgagcgacatctggaataccgcttgccgttcggcgatggtggcgttgggaaagagcggtaggccggcacgggcagcggcgctcgacagcttccgcaagagcggtttggagacgaagtagtaggcgacgtacagcgccagcgctgtcgcgatgatgatcatcggtctgccaccgagctgacccgccgatagccgtttctgttccaccaatactggctgttgtagatcaggtggcccagaacacaggcccagatcccccagaagatgaacaggatagtccccaaggcggcgagcgggatcttggagaggacctgtccccgtccgaacaccgagtggccgcaagcaaacaagagtgctcccacagcggtgagcgcgagccaggccggggttgctcgcagactgatcaccgggaccccgacccggaagccgacctcttctcctacagcgatgactagcaactgccacagcggcatgttctgaacggagcgcgcgactcgggctcgagtcacccacacgggctgttgagcgctcacatcaccactcaggtaccccggtgaggcacttcgcttagtactggggcccgatgtgcgagcattcgtgatgtgtcgcaggatccggttgtcaagccaagaggccagcagggctccggcgacagtgacgggtagcccgatcagcacgaggccccagccatgcggtgccgagaggtttctggccggcgtgcacgcgaggcaggcaagtgccaacactgccagcactacgacgtagatggtcgcataattcgacttgcgggtgacgttgccgaccatcttggccaaagtcgctggggaccagctgatgagtgcgatggtggtcagcaggaagcaggaccagacagacatccggcgcactcaggggtatgggtgcggctgtgggttttggaaaccgccatatgcggcgtagcgggggtgtgcccgcatgggtgcgctgggcagtgacagggcgagcagcccaggcgcccagagcctgacacagtgcagtcccagcccctggatctctatggtggtgaaatcttcgatgtacaggggtgacacacaggtgatgctgttgaccacgctctttaccagttccgcccccgtgtgggtgtcgtcaggtggcaggtcttcggcttgggcaatggtgcccgcgtcgaatttcgccacaactgattgcgcggcctgatagttcctcgcgtagtaggagacgttcgagtcgaggtcaagcatgtcctccgtggacatactggacgcgtcggcctcggcgtcgaaagacgtccataccgcgagcatccgaaccccgctgcactcgagaaacgccttgtacatggctgcttccagacccgcgtctgcacctaggccgacggcgacgaggggaagttggttgccactaccgaccatcatgcatgccacggtgaaatgcttgagcccgggagtcggaagccagtagaaacgcagttcgtggcttcggcccgctgcacgttccacgagccgctggatgcgctggaggcggggtccttcgacgcggatgcgcacaggtgacgaggctccataccacaggcccatcgcggcatctacctggatcaattcataagccgcggacagcgttgcggcgacgcgtgaagtgtggacggcggtgccggtcgtcacggccgttcccagccacggctcaccgtcgtgccgacgggggttgtaacccaggtaaaagaactgcgccgggatccactcctgccgggaggtcccgacacggggagtcttgacccatgtcatgggcaagtcgtcgcgataggtgtcgaacgcacctccagccactcgttgcgcgaagccgaatgcgcccagatcgagaacttcgtcctcggtccgggcgaggagttcctgacgagtcgcccagcgccgttcgaagggactatggagaatcccggtacccgcgcagtagcgctcgacggcctccgcgtagaccttgatctctgcctcaaactcgttcagccccaccccaccgatgtggtagctacccggcttggggtcgggccggtcaagcagtgcgtgcatccccgtgagttccccaccgttcacccgcacgcgggggccgagcgcggggtgcagcgagtagccgacggaagtcaccagcccgcatagcgggctgtaggtgcgccgcctgagccgggctgcggtctcgacggggtcgctatcctggcgaagcttcatcgctcgccccctgccgccagccactcacggatgtcgtagtacaggtccggagcggtttcaacctgcgctggtgcatcaaaacgggacataggtaggacgtcgttgtaggcgatctccatcgtcggtatgtagaccgacaacactttgttgcgcgtcgtgttgaggccgttgcgggcgatgctgacagcctcatgcgcgacgtgcgcggccaagatcgcgcgcaccgacgctgccacggccggcgctccggcccttacgcggtcggcagcggccacccgcatccaggacaggtagctctgccgttcgcgcaggttcatcgcgacccgctgctcgaaggtccggtaggacgaggtcgcaccagggacgacgtagggacccacgtacaaggccggcccgtctacagctgcgtggagccacgacaggtgggcgcgtcgggcgaacaggtcaagggcgcgcagcatagccgggttgttctgcgccagcgctaccacaaggagtggctgcaggtccggcgccgaacccagcaacgccaacatctgggaggcctcctgctccatgtgcaactcgtcggccgactgctcaagccgcaggcctgcgaagagggtggctgatggctgcgtgtcgtcagcgaggacggtagcctgcagcccctctccctcgagaatctgctggatatcgccggcgaggagcgcgtcgtcgctgaatacccacaccgggcgcgtctctctacctccatccatcttgtcctcaacgttttcgaccagcgcaccgatcgatgctaggtgggccatcacgtcgtcaagggccgcgcgggtcaatccgggcacccgggacacgatctcgggcggctgcagtccttggctcaacaagtccaaggccggccacagggtcccggtggcgtcgtcgtcctccagcgttgtgctctcggcgttccagacgcctcgacggaactccaccctgtccatcgagtaaggcaccatcatgaggcccggtgaaatgtggttggtcactttggctcctgtacagcctaggcttggacgcccacggtcatggtgtgggtcgcggtttggaaaatcccgtcgaggttgagtgcctgattgagttcgtcctcgtagaagcttgaggactcgactgaggcaagaccgagccccgtgcagaccaagttgatctgttgtgcgatcgccccgacttcttgaagggcgaacctcaaacccctggctccgtacttccgcatcgccctccacggcgagatgacgaacaccaagtgcactccggccgcatccgattgctccacggccggctcgccggccatcgaattcctcacgccgcgacagccctcttcaccggtcacgggcaccagtcgatcgatgaccggcgagtagcggtagacgccgcgactcaagccggacacccgttgtgcggacatgaagatagacacgggatacagccctccaccagacgggacagcgcgtacattataccgcacgatatcaccgctcgaacgtgggacatccacgtgccccgtcacaccggcagcacctctcagaaacgcagctacgtcacgcaggtctagggattcgccggtgtagttccgtccgctgcgccggcgggcgatcacttgctcgaggggtgcgcgcaccctgctggacctgggaagttcgatcacatcggcagcgaacgtgtcgcgatccatctgtccgtacgtaacgatcatggggtcaacgaaatagtcgccgaccgagacgttgaactccatatccccccgggcgatgcgcgaggcgagcaagaagtctgcagctgcgttagacagccccggcccatcagtgttgtcgcagcggaactcgtgggtccgaaaccccacaccttccgtgcccgggctctgcgctcgatacgacgtgatcgcagaactagccttccttaaaccgcccggagtagctaccatgaccgtcccctctgaggtctcccgaacacttgcgacaatagcagcatgtgggggcagccgccagaggcgggcatccttgtcccgacaaccattgacctccggattcgatatgtgcataatcatagtcgtgccaacacgaaacgtgtacgtctcggaagacgacctagacctgttcgccgaagccaccgagatcgctggaggcctgtccgcagcggtgttggaggccttgcgcagctacgtagacaggcaccatcgcgcggccggcggattcgacgagatcgagctggagctgcagaacgacggtatcgaccaccgtgtcaccttcatgggtcgccgcctgatacacatccgccgtccagatcccgagggaacccgcatagacactgtctacttgaccgccaaacaccaattcgccgttgccaccaaaatccaacgacggctgccagactggacgaccggccacgagcacatctggtccgacccggagacctggaatcgggagttctggatcgcaggtgacaagacgatggccgtgtatcccagccttgacaaactccgcgaagctgaccccaatgtggccgaacgcgccgaggccgcggtcaaaatcccgccgttcgaggtcctggacatctgatgacagaatcatcatcttcccggcggcaattggcaatgccggtgctgtcagtcacggatctagccaagaaatacgtggttcatggcggctacgaggtcccggcactcaacggtgtctcgtttgacctgcacccgggagagatgctgggtttgttcgggccaaacggtgctggaaagacgacgctggtcaggatcatcgcgggcctcttatcggcagattctggagacgtccactggggatcggatcaaggtcgggccaggttaggctacgtgtcccaaaagggtggactgcagtacgggctcacgtgccgggaagagatggtcttccacgcacaatgcttcggccagtccgccaagcaggcccggactagcgtcgacgaggtcgccgcgatgctgcactgcgattacctgatggagtgggacgtcggaaggctctccggtgggcaacgccgaatcatcgaggtagggctagcactcgtcaatcaaccatcggtcgtcctgctcgacgagcccaccctgggcctggaccccgcaacacgcctgtcgttgtggcaaacggtaaagtcggcacgccgtgagaccggtgctgccttcctcgtcaccacccactacattgacgaggtggccgagcacctgtccaacgtcagcgtgatcaaccacggaaccgtcgtcgccaacggctcgccagcgcacatccgagaaatgttcgcgaccggggaagtaacgctcggcgtggccgaggatacggtggacagtgcggtggacgtgttggctgggaccgcgttcgaggcgcaccccaccgaaaccgtcccggggatcgtggtcaggtccaggcatcccgacgtggacgcggccaagatcatcaccatcctggctggtcatggcatctcggtggactccatatccgtacgcgaggcgaccttggaagaggcgtttctcacgatcacaggcagtcgagacccggagaggcaaatcccatgaacacttgcttcaggcgatatgcggcgatgtcgctgagagcgcggcgtgatttggccctgacattcatccagcccctcgtctacctagccctcttcggaccgctcttcgtcacgacgatgaagatgtcgcagagagctaccgccgctacgggttactccctatacatcacgggcctgtccatccaaatggccatgacgatcggtgccttcgcggggctaaccatcatcctcgaataccgactcggcatcctcgaacggatctggagcacccccctcacggggagcaagatgatggcggggcgaatcgcgcgcgacgtcgttatgatgatgatgccgatactggtcgtcttcatcatcggcctggtgctgggaacacgccccagcccactgggcctggcgacctacttcgtgacagtgctcggcacaggagccacgttcgccggggtctcctacgcggtggcactcagaacgaagagcgaggcagcgctatccgcgatcttcaacctcatcctgctacccatcctcctgctgtcggggatcatgctgcccatgtcgttcgcaccacactggatcgccaccgctgcccacgtgaacccgttgtggtacctggtgcaaggcgcgcggaaccagttcagcgttctagggctcgtggcggcggccccatggagttgggctgtggccatcgtcatgtcagccgctgccttcggctgggcaagccacgaattcaacaagaggcgctgacacaaagaatggtgccgggaacccaggtccccggcaccaccgagtgcactcgcgacgtcaacgcaccgttgcggtcactgcgcaggtcgagcacgaggacgacgagcccgcgctgctgcaggtcgagccgccaggcgcgagcaggtcgacgttagcgtcggcgccgccgaagacggacgtgacggccggctgagaggtgcggatgcggtgctccagcgaggaggtggtggtgagtttcatgggaggtgctcctaggagtgagacgagaacaaaccctagcgataggttagcagtccgcaaccgactccgggaatagtagaagcgcgcatccgtagcggaagaccttagcctgattacagtgaccctgttcgcgtctcaacattattccacacccccgagcagcgaacgacaccgcgatgatgatccgtcgcctctccaccgaagaactccgcgcccacatcgcaccgggccgccgtcccgtgcatcagacctgccgtcaacgtcggccatgaagctgggaaggtggctctcgtctaggagcagacgcgggacgcctcctccaggttgggccggggaagtgtccggttcttgatgtaggtggcggtccctattgatgggcgttgaccgtgggaatgcggtcggcgaagggggtggcgaacccgttgagcgcaggcttccagcgcatgcatcaacgctgtctgccggccaccggcaagcctcacccgcccgtcatggccatcatcgaggtgccggtgaatcctcgacacatgatcccaactcccccggaggggcttccggggctgttcagccaccagatcagccaggcggcgagcccgactctgccacccggaccctgcagagcgtgcctgctgccgtcgtgtcgtgtcgggccagtgggccaccagatcggccacatccgtcttggcccat

SEQ ID NO: 117 - DNA, 12567 bp, Propionibacterium acnes
gtgttccagtgcctcgcgggcgtgatgttcttcttcggcaccttcttgccacatgcttcgcgcttcagcctcgccatccaagcgaacctggactgtgaacgagtcctcatcgggtccgtcctcattccacgcggcaatgatcccacgggcctcgtctgcgacctgactcaacttcatcgcctgcccgacagccccgagagccggaatctcgaacacccagatattcgcctcagccgagacctcacgatgggcgatcacttcgtaggtcgtctcaccttctactgtcgtgtccattacttccactccttcggaattttcacgcctgctcgctccagctgtgccaggacaccaactgacgtcagctggtgtcctgctggtatcgatacgcgcccggctccgccggggcgtccccagatttcatggcttcccttggcgttccgcagacgggcccatccttgagaacggagcagcttgaggacgtccttagttttctgcggtttcacacatcatagtatagccccacttaacttgtaaactaagcccctgtttacattttagttggtgcatgtgatccctgctcttatgacgtcgcccgacctggcgccttagacatgcactgttcatcctcaaccacactcaccgtcacgggtccgaaggcgaggtctatcaccattcgcatcgatgaagttgaagcaggatcgtccgcatcacgcactgccgatccggacagacgccaccggccgtaccgactgtttacgatctgccaccgcagactgctgccataaccgctatcacctctgatagtacgtttagtactatcagaggtgattcaagattctcctgtcgagcagccctacagtcacgaagtcctgcgatcgtcatcgcttaaggcagacggatggccatcggggaccactcgcaaagcaggggcgatcagcaacagtgatgtgccatgagcaagtactggtgcaccggctgtttactccgcccctagataaaccacgggtgcaggggtggacaccacaccatgaccgatgtggtgcccaccccatggctcacaggcaggccctatcgccgggagcactgctgcagatgaggctcagtaacctgccatgtctcacctggggccaaggtgccaagctccccacggaatctcaggcatcggaaaccagcagccgaacttccacagcatgagcgccctacgaaaaagcaggccgccgacggttctcaagaactcgccggcggcctgcatcgccactcgaactgtaaccgtggtccgaccccgtgcacaggtaagctccacactcccaccaggcatggccgaggcagtaccaagttgccgtggcccatcggcagatttggttaaattttgaaaagtcatatagactccttctgtaaatttttaaatctcataggactctcgccatcgccagccagcttcgacaggagtcccgatgtttcaccgagtgaaatatcggcaccgtttgagttgacctaaagctcaaaagatgctagaatccatcttacctcgttaggggcgttttgtcaaacgcccctatattgcgtgtcttcgcgcgtcgtagcgctgatgctgcgcctgtgtcgactatccgtttgtaagtactttcgatgacaccagcagtggctactcatgactggtgcgtgcgggtctaaagcagcagggaaaggaatcgcagtagaagccgcttgattcctatcacccctgatggtactatcagtactaacagagcagggcttactcgatgcgtgagaatcggggacatgctgagcctctcgtaggtcattggcctgctgggcgtcagtgtggcgcggttcgatccagtgaactctatcagctctgttagtactgtcagagttgatatattcgaccccaggaggagcccatgagttacatcgttcgcaccggaaatttggtcgacacccccgagctgcgtgagggagagcatggcccgtacacctacgctcgcgtcatcgtgtccgatcgcattcgccaggaggacggcagctacgtcaacgggccagcgatcgcctacgacgtcttggcgggtggcagccaagccgtgaatctggttgaagccgccaaggcgagcggcaacatccgcatcatgttcgcgggccgttaccgcgtcaccgagtggcggggtgagcagggcactcgtatccagcatgaggtccgagccgacgaagtgagcgtgagcctgctcggtcagagggtgaccgtggagcggcctcgaggtgacgtggcatccaaggagagcacgtcgttctgattgagtccgggggcacggtggtcgccgtggtaaaccgtgcccctgacagtactattgacactattggaggtatcagtgtgactgctcaaattttcgccttgtgcaaccagaagggtggcgtcggaaagtcgacatcgacgtttcatctggcccgtgccgcggtgttgcgtggccagcgtgtgcttgtcgtcgacaacgacccccagggcaacctgacgtctgtcgcggccgccgagcccgtgggggaggatcaggcggggctggccgatgtgctcagcgcgcgtgctccagagaccctccgcgatgtgatcgtgccgggaatctggtctggcctcgatgtcgtgccgacgtctggcatcacgctcggctgggtgcgtgacgaactcgtgatcgccggtgccggccgagaaggccggctgcgggaggccctggccggcgtcgaggacgactacgacgtgatcctgatcgactgtgctccatcgctcgatcagctcacgatcaacggcctggtggccgcccagggtgtcatcgtcgtgacgcactcgaagttgtggagcgccaacggcctcgcccagctgctcgacaccatcgacagcgtgcgcagctactacaacggcgcgctgcgcgtggcgggcatcatcgtcaaccagcacgaggagaacaccatcagcgggaaaacctggctcgacgagctgcatcaggctgccgagtcccggaagctgaccgtgcttgacccgccgatccccaagcgtgtcgtcatcgccgataccgtcgaggccgcgcgcggtctcgacgagtggggaagtgccgaggcggccgcgctcggccagttgtacgcccaccacctgacctgcatcgaaggagccctgtgatgacccgtccagccccccgaaagtcctcattgagcggatcaactccggtcgccccgccggctcagacggcgccggcaccgtctgccgcacctaccccccacaaggccgatgagtcacagacgagcagcaccacgaggaagtggcggcacaaggtgtcgttctaccaggacccggccgacaccgaccgggtgcgcggggcgatcctttacacgatgacgaccgagggcaaccggaacctgagccagttcgtcaacgatgccgtcatggccaaggtggtcgagctggaagtcaagtacaacgatggccagccattccccgctgtgggagcccgaggactaccccagggcggtgcagccgccgccggtgagtagaggaccatcgaccgtcgggggcttcaccatgcccccgaccctcggtcatcctgatcctcttgtcgatggtggtgacagtgggggattcacgcctcgttcagatcagaggaagtctcaccgcgtgattagtactatcaaatctgacagtactaacagagcagatagggttccctaggtcgagctgtatcacgccgacaaccagtgagccagtgatctacgaggggcgcaatatgcacccgatcggtagccgcgaaggcctcgccctgccccgatagtactatcaccactatcaatggtgctagtggtgagtttcttccattgatgacaacagcacagtgctgccgtctgtgtgcgggccaccagcccgcacacagttgccgtcgaggacgttgttcatgctctgtggtggccggtcctgagggcggctcgcaggatctcccggcgctcacggcgacgagcctggtagccaaggtctgcatgttcggcggcgagacgggctttgagggttgcggcttctgcacggcggtggagttggtcgtcgatgagttgggcgcgggccagacgccgcttatgggggttgtcgtgggtgaggggggcgtcgaggctgccgtcgtgggttagggccagggctgctcgttcggcgtcgtcgaggccgatgtggtggacggtcacgggtgcggtggtgacgtcgaggatgtccaggtggatgttgtggccgccgccgggggcttcggggaagtctggtgggctggcctggccggtgtcggggtcataccaggacaggccgatgatctcggcccagggtgggggcgggcagacggctcgcagaagggtgtgggccaggaacgtgttgcgggccatgatgcctccaagggtgaaaagcagtcgagtagcgatgacggcggggtagccgtctgctgggctgaggccgaccgggcccatgtcctcgatgctcttgtgctgcggccataccccaaagctaccaaacagtctttttaatctcaaagatacaaacagtgcttgacatattatctgcagcgaaagatactttcatcatggtggctgatcatgattacgcgactcctgacgatgagtggatgacacctcctcaggtggcccgtgtgattccgaacaccactgctcaggctgtccggcgctgggctgaggagggtcagcttcctggggcgtttcgtactccttctgggcgttggcatattccgtggtcggctgtggtgggcatcatggggtttgatccgcgtgagtccgcatcaccgagtgatcgtcaccagagctgacagagtcgtcgatgagctttcgagtgcagagctgatggcacgacggtctggatacttgtggagatgagagacgaccacatccagtcatggtcggggtacaccgaggggcagattcagcagtgctggcacgatgaggttgcccctgccattgactcgctcatggagcaggtaaggtctgttgccgagactcctgtgccgccgggttcgagattttacggcgatgagcagtgggccaagccttttcatccgtctactgcgatctgcggttcaatgggtccgccagcgatcacttgcacgcgctgaagctcctcgtctgggaagcgaacgtccaccatgtctatgcgccgtacacccttgctcgtgcatctattgaggcatcgtctactgctgtgtggctgttgagcacgaagacgcgcggagaacgtgtgctgcgagccttgcgatggtacgcgcaggattgtcacgactcgtgcaggttcatggatgatgagcagtatcgtgaccacctattgcggcgcattgaggggactgtcgctgcgggaaatctcgactcgcgcgctgctaggaaacggtaccgtgcaaccgatgttgtcgatgaggctgatcagctggttcccggaactctgagggcgtggcgagctttttctggtatggcccattcccgtatgtgggcatccagggggctgctcgacatggaagtgctgtccagtggccaaggaatggttacggcgaaggtgacgagcggatcggcccaaatcctttgggccgtcgtggcagctctgaatgttgctctcagtgccgctcgcttgtggcgtgattcgatgtgctcaccgtttgctgttgcccagtcggtagacgcgatgccagaggcgtttcgccgccctgtttagggtctgatcggggtagtgggtgttcacggggtcccaggttggccatggggcggcttggtgatgtgagttgggttgtgtggcagcctgggtgttgggtgtggcttcgttggccacgaaggcatgctcttccttgtgctgggacttgagtccccagtgctctcccctttgctagtggggggtggggtccccggaggtaggtcctccggggactttttctatgtctgtccgtgccccaggatttcgtatctaggcagtaccaattttgggttagttggaggtttctttggtaatggacagggtgagggtgatgaagaggtggccgtccttggtggcagaaattttctcgaacttcagctgaatgttgttatcagccactatctgttgggcggtgaggtgctcggagagcttctggaatccttcgcggatccacaggttgtaggggttggtgaccgagaccgaagggtatgggtcgaccttcagcgtcaggactggctggtctgggttgagggagttgatcttcaccagtttggggtaccggtcgcactcatgtgtctcttgtgttgggggccagcagtcgggggcccattcctcccagtggtcacgcatctcacgaagtactttcctgcatctcagcctctgcaggagctcgcgcgccaccgatgggagggctgccatgatgagggcaaggactgcgaacccgatgatgtaattgaccgtgtccctcgtcacgccgttcttgccgaggattccgatggcgaacgcgatgacgacaccgcccaggcacaggtgcatggggtcatgctgtgatggtttttcttcttcagcgactggtggggctatagtcatgtgtgccccttagtactaagtgatactggtgggttgcttttccccggtggccgtgtgcaagacggccaccggggttttccttcatgttcctgattttatctgcccggtgtggcgttttcatctttgtgtgggtggttcgcctggggtcttggagtgtggtgacgcggtgatggtcacggtgacggtgactgtggcgcgtggcgggtgaggtggttctttcctggtctggtgtgtggcccaggtgagtgtggtgatgagggccagggtgaggatgatgaccagggtggggagtagtttgtctggccggtgtcgccgggcttggtggcgcggcatgtttttccagggtgtgtctccgaacaggtcgtcgtcggaggggtcgtcgtggttcatagggtggccttggcgatggtggtgggcgagtttggtccaggtgatggtgccgtcggaggcgatgtggcggtcggcgggcagggtgtggacggtccatccggcgtcggtgagggcggtggtgaaggatttcttgatggatcgtttgggtaggtcgatgggggcgtgggtgccgacccagatgcaccggtttttgaggtgggtggcgccgaggtggttcatgtcgcggaccatgttttgggtgagtgtgagggtgtcggggtcccattggacggggatgatgatgtggtctgcgatggtgatggcgtgttgccaggcggcgtcgaggtcgttgtttccggtgtcgaggatgatgacgtggaagcggcttcttagggcggtgatgatgcggtcgaggtcgtcggcggtggggggtgtgatgaggctgttgtggttgtcggtgatggtgggtaggcatgtgatggtggcccagccttctggttgccaggagatgtaggggccgaggtcgcggggttgggaggcgaatcctgggtgacgggctgcgcgggcgaggtcgatgacggtgttgtcggtgtggcggggtgcgcgggtggagagggtgccgcgtgggttgatttccacgacgacgatgtcgtcgtgtcctgctgtggtggcgagggcttgggcaaggatgacggccagcggggttttgccggtgccgcctttgaggttggcgagggtgatgatgtggtcggtgagttgggcgggtgcggcggtgtggtgagggttggcggtgaggttggcgatggtgaacagggcatcgagatcgtcggtggtgttctgctcggtgggttgggggtcgccggagatgatcgggtcggcgcggcgcggctgccatgccggcctcaccactgtcacgaccaccacgggtctgctggcgctgtgtgggtgtcgtcggcgatgactcacgatcggcagtctcaccatcgtctcggtgatgctcggctagcgctggacccggtcaagttcgggccggctcacccagtggtgatgactcggtcacagaaccgctgccggtcgttatctcggacgtctcgactcctccagtcctgatgggcgttggagccacctacacctactctcagaacgaccccgacctcgtgtggggcgggggcagatgtcacttgggccaatcgagagcccaggtgatggggaaagcaggggtgtgatatctgtcctggaaaactgggcagctgctaccgtggattgacggatctccacgaaagaagggaatgcgaccatgcagatcaccgtcaagaccatcaaagatcatcgggttcgcactgtccagaccgccatgagcagcgccttggggattggttcccaggtagacatgctcgcccccggcggttccaccagctcgagttccggttcatgctgctcgtgctcgacctgcgcggtagtggcgcagcctcaagactgaacggctggtcagccccaggggcgtggcgctcatcgcgtcacgccccttctattcgctggacagggtgcgcgagctgaggaacatcgcggtgtgtgcgatgacgaggggcaggagcaagtctgtgcgggttgccaagtagccctgcgcgatggccatcacgctggccccgacggcggcgaagacacctccgatacgtcgcttcatgccgccgaattgcatcaggacgaataggactcccgcggtccacatccctccgggcatgcatctgggaaagatgaaccggaagatgatctcttcacaggagagctggagtactagcagcgtagcccccacggggagactcacctctactgacagacggatcgtcttcatccacccacccgagctggcatcgaccatttcggtggccatgcgcgaccggtggcctcgtgcctctcgctgcgtgtcgatccagccgagcagtccgtggacgctctccgctaggactcctgacgcgacagtctcaccaattcctaagcccacggcgaggaccgcgacgcccccctgcacggcaggctgtgtgacttggtggtcccaccaacccgccggcaggaccatgcgtgcgaggctgcacacgagcaggaggtggagggtcacgacgagcgacatctggaataccgcttgccgttcggcgatggtggcgttgggaaagagcggtaggccggcacgggcagcggcgctcgacagcttccgcaagagcggtttggagacgaagtagtaggcgacgtacagcgccagcgctgtcgcgatgatgatcatcggtctgccaccgagctgacccgccgatagccgtttctgttccaccaatactggctgttgtagatcaggtggcccagaacacaggcccagatcccccagaagatgaacaggatagtccccaaggcggcgagcgggatcttggagaggacctgtccccgtccgaacaccgagtggccgcaagcaaacaagagtgctcccacagcggtgagcgcgagccaggccggggttgctcgcagactgatcaccgggaccccgacccggaagccgacctcttctcctacagcgatgactagcaactgccacagcggcatgttctgaacggagcgcgcgactcgggctcgagtcacccacacgggctgttgagcgctcacatcaccactcaggtaccccggtgaggcacttcgcttagtactggggcccgatgtgcgagcattcgtgatgtgtcgcaggatccggttgtcaagccaagaggccagcagggctccggcgacagtgacgggtagcccgatcagcacgaggccccagccatgcggtgccgagaggtttctggccggcgtgcacgcgaggcaggcaaatgccatcactgccagcactacgacgtagatggtcgcataattcgacttgcgggtgacgttgccgaccatcttggccaaagtcgctggggaccagctgatgagtgcgatggtggtcagcaggaagcaggaccagacagacatccggcgcactcaggggtatgggtgcggctgtgggttttggaaaccgccatatgcggcgtagcgggggtgtgcccgcatgggtgcgctgggcagtgacagggcgagcagcccaggcgcccagagcctgacacagtgcagtcccagcccctggatctctatggtggtgaaatcttcgatgtacaggggtgacacacaggtgatgctgttgaccacgctctttaccagttccgcccccgtgtgggtgtcgtcaggtggcaggtcttcggcttgggcaatggtgcccgcgtcgaatttcgccacaactgattgcgcggcctgatagttcctcgcgtagtaggagacgttcgagtcgaggtcaagcatgtcctccgtggacatactggacgcgtcggcctcggcgtcgaaagacgtccataccgcgagcatccgaaccccgctgcactcgagaaacgccttgtacatggctgcttccagacccgcgtctgcacctaggccgacggcgacgaggggaagttggttgccactaccgaccatcatgcatgccacggtgaaatgcttgagcccgggagtcggaagccagtagaaacgcagttcgtggcttcggcccgctgcacgttccacgagccgctggatgcgctggaggcggggtccttcgacgcggatgcgcacaggtgacgaggctccataccacaggcccatcgcggcatctacctggatcaattcataagccgcggacagcgttgcggcgacgcgtgaagtgtggacggcggtgccggtcgtcacggccgttcccagccacggctcaccgtcgtgccgacgggggttgtaacccaggtaaaagaactgcgccgggatccactcctgccgggaggtcccgacacggggagtcttgacccatgtcatgggcaagtcgtcgcgataggtgtcgaacgcacctccagccactcgttgcgcgaagccgaatgcgcccagatcgagaacttcgtcctcggtccgggcgaggagttcctgacgagtcgcccagcgccgttcgaagggactatggagaatcccggtacccgcgcagtagcgctcgacggcctccgcgtagaccttgatctctgcctcaaactcgttcagccccaccccaccgatgtggtagctacccggcttggggtcgggccggtcaagcagtgcgtgcatccccgtgagttccccaccgttcacccgcacgcgggggccgagcgcggggtgcagcgagtagccgacggaagtcaccagcccgcatagcgggctgtaggtgcgccgcctgagccgggctgcggtctcgacggggtcgctatcctggcgaagcttcatcgctcgccccctgccgccagccactcacggatgtcgtagtacaggtccggagcggtttcaacctgcgctggtgcatcaaaacgggacataggtaggacgtcgttgtaggcgatctccatcgtcggtatgtagaccgacaacactttgttgcgcgtcgtgttgaggccgttgcgggcgatgctgacagcctcatgcgcgacgtgcgcggccaagatcgcgcgcaccgacgctgccacggccggcgctccggcccttacgcggtcggcagcggccacccgcatccaggacaggtagctctgccgttcgcgcaggttcatcgcgacccgctgctcgaaggtccggtaggacgaggtcgcaccagggacgacgtagggacccacgtacaaggccggcccgtctacagctgcgtggagccacgacaggtgggcgcgtcgggcgaacaggtcaagggcgcgcagcatagccgggttgttctgcgccagcgctaccacaaggagtggctgcaggtccggcgccgaacccagcaacgccaacatctgggaggcctcctgctccatgtgcaactcgtcggccgactgctcaagccgcaggcctgcgaagagggtggctgatggctgcgtgtcgtcagcgaggacggtagcctgcagcccctctccctcgagaatctgctggatatcgccggcgaggagcgcgtcgtcgctgaatacccacaccgggcgcgtctctctacctccatccatcttgtcctcaacgttttcgaccagcgcaccgatcgatgctaggtgggccatcacgtcgtcaagggccgcgcgggtcaatccgggcacccgggacacgatctcgggcggctgcagtccttggctcaacaagtccaaggccggccacagggtcccggtggcgtcgtcgtcctccagcgttgtgctctcggcgttccagacgcctcgacggaactccaccctgtccatcgagtaaggcaccatcatgaggcccggtgaaatgtggttggtcactttggctcctgtacagcctaggcttggacgcccacggtcatggtgtgggtcgcggtttggaaaatcccgtcgaggttgagtgcctgattgagttcgtcctcgtagaagcttgaggactcgactgaggcaagaccgagccccgtgcagaccaagttgatctgttgtgcgatcgccccgacttcttgaagggcgaacctcaaacccctggctccgtacttccgcatcgccctccacggcgagatgacgaacaccaagtgcactccggccgcatccgattgctccacggccggc

SEQ ID NO: 118 - DNA, 9859 bp, Propionibacterium acnes
ggggttttccttcatgttcctgattttatctgcccggtgtggcgttttcatctttgtgtgggtggttcgcctggggtcttggagtgtggtgacgcggtgatggtcacggtgacggtgactgtggcgcgtggcgggtgaggtggttctttcctggtctggtgtgtggcccaggtgagtgtggtgatgagggccagggtgaggatgatgaccagggtggggagtagtttgtctggccggtgtcgccgggcttggtggcgcggcatgtttttccagggtgtgtctccgaacaggtcgtcgtcggaggggtcgtcgtggttcatagggtggccttggcgatggtggtgggcgagtttggtccaggtgatggtgccgtcggaggcgatgtggcggtcggcgggcagggtgtggacggtccatccggcgtcggtgagggcggtggtgaaggatttcttgatggatcgtttgggtaggtcgatgggggcgtgggtgccgacccagatgcaccggtttttgaggtgggtggcgccgaggtggttcatgtcgcggaccatgttttgggtgagtgtgagggtgtcggggtcccattggacggggatgatgatgtggtctgcgatggtgatggcgtgttgccaggcggcgtcgaggtcgttgtttccggtgtcgaggatgatgacgtggaagcggcttcttagggcggtgatgatgcggtcgaggtcgtcggcggtggggggtgtgatgaggctgttgtggttgtcggtgatggtgggtaggcatgtgatggtggcccagccttctggttgccaggagatgtaggggccgaggtcgcggggttgggaggcgaatcctgggtgacgggctgcgcgggcgaggtcgatgacggtgttgtcggtgtggcggggtgcgcgggtggagagggtgccgcgtgggttgatttccacgacgacgatgtcgtcgtgtcctgctgtggtggcgagggcttgggcaaggatgacggccagcggggttttgccggtgccgcctttgaggttggcgagggtgatgatgtggtcggtgagttgggcgggtgcggcggtgtggtgagggttggcggtgaggttggcgatggtgaacagggcatcgagatcgtcggtggtgttctgctcggtgggttgggggtcgccggagatgatcgggtcggcgcggcgcggctgccatgccggcctcaccactgtcacgaccaccacgggtctgctggcgctgtgtgggtgtcgtcggcgatgactcacgatcggcagtctcaccatcgtctcggtgatgctcggctagcgctggacccggtcaagttcgggccggctcacccagtggtgatgactcggtcacagaaccgctgccggtcgttatctcggacgtctcgactcctccagtcctgatgggcgttggagccacctacacctactctcagaacgaccccgacctcgtgtggggcgggggcagatgtcacttgggccaatcgagagcccaggtgatggggaaagcaggggtgtgatatctgtcctggaaaactgggcagctgctaccgtggattgacggatctccacgaaagaagggaatgcgaccatgcagatcaccgtcaagaccatcaaagatcatcgggttcgcactgtccagaccgccatgagcagcgccttggggattggttcccaggtagacatgctcgcccccggcggttccaccagctcgagttccggttcatgctgctcgtgctcgacctgcgcggtagtggcgcagcctcaagactgaacggctggtcagccccaggggcgtggcgctcatcgcgtcacgccccttctattcgctggacagggtgcgcgagctgaggaacatcgcggtgtgtgcgatgacgaggggcaggagcaagtctgtgcgggttgccaagtagccctgcgcgatggccatcacgctggccccgacggcggcgaagacacctccgatacgtcgcttcatgccgccgaattgcatcaggacgaataggactcccgcggtccacatccctccgggcatgcatctgggaaagatgaaccggaagatgatctcttcacaggagagctggagtactagcagcgtagcccccacggggagactcacctctactgacagacggatcgtcttcatccacccacccgagctggcatcgaccatttcggtggccatgcgcgaccggtggcctcgtgcctctcgctgcgtgtcgatccagccgagcagtccgtggacgctctccgctaggactcctgacgcgacagtctcaccaattcctaagcccacggcgaggaccgcgacgcccccctgcacggcaggctgtgtgacttggtggtcccaccaacccgccggcaggaccatgcgtgcgaggctgcacacgagcaggaggtggagggtcacgacgagcgacatctggaataccgcttgccgttcggcgatggtggcgttgggaaagagcggtaggccggcacgggcagcggcgctcgacagcttccgcaagagcggtttggagacgaagtagtaggcgacgtacagcgccagcgctgtcgcgatgatgatcatcggtctgccaccgagctgacccgccgatagccgtttctgttccaccaatactggctgttgtagatcaggtggcccagaacacaggcccagatcccccagaagatgaacaggatagtccccaaggcggcgagcgggatcttggagaggacctgtccccgtccgaacaccgagtggccgcaagcaaacaagagtgctcccacagcggtgagcgcgagccaggccggggttgctcgcagactgatcaccgggaccccgacccggaagccgacctcttctcctacagcgatgactagcaactgccacagcggcatgttctgaacggagcgcgcgactcgggctcgagtcacccacacgggctgttgagcgctcacatcaccactcaggtaccccggtgaggcacttcgcttagtactggggcccgatgtgcgagcattcgtgatgtgtcgcaggatccggttgtcaagccaagaggccagcagggctccggcgacagtgacgggtagcccgatcagcacgaggccccagccatgcggtgccgagaggtttctggccggcgtgcacgcgaggcaggcaaatgccatcactgccagcactacgacgtagatggtcgcataattcgacttgcgggtgacgttgccgaccatcttggccaaagtcgctggggaccagctgatgagtgcgatggtggtcagcaggaagcaggaccagacagacatccggcgcactcaggggtatgggtgcggctgtgggttttggaaaccgccatatgcggcgtagcgggggtgtgcccgcatgggtgcgctgggcagtgacagggcgagcagcccaggcgcccagagcctgacacagtgcagtcccagcccctggatctctatggtggtgaaatcttcgatgtacaggggtgacacacaggtgatgctgttgaccacgctctttaccagttccgcccccgtgtgggtgtcgtcaggtggcaggtcttcggcttgggcaatggtgcccgcgtcgaatttcgccacaactgattgcgcggcctgatagttcctcgcgtagtaggagacgttcgagtcgaggtcaagcatgtcctccgtggacatactggacgcgtcggcctcggcgtcgaaagacgtccataccgcgagcatccgaaccccgctgcactcgagaaacgccttgtacatggctgcttccagacccgcgtctgcacctaggccgacggcgacgaggggaagttggttgccactaccgaccatcatgcatgccacggtgaaatgcttgagcccgggagtcggaagccagtagaaacgcagttcgtggcttcggcccgctgcacgttccacgagccgctggatgcgctggaggcggggtccttcgacgcggatgcgcacaggtgacgaggctccataccacaggcccatcgcggcatctacctggatcaattcataagccgcggacagcgttgcggcgacgcgtgaagtgtggacggcggtgccggtcgtcacggccgttcccagccacggctcaccgtcgtgccgacgggggttgtaacccaggtaaaagaactgcgccgggatccactcctgccgggaggtcccgacacggggagtcttgacccatgtcatgggcaagtcgtcgcgataggtgtcgaacgcacctccagccactcgttgcgcgaagccgaatgcgcccagatcgagaacttcgtcctcggtccgggcgaggagttcctgacgagtcgcccagcgccgttcgaagggactatggagaatcccggtacccgcgcagtagcgctcgacggcctccgcgtagaccttgatctctgcctcaaactcgttcagccccaccccaccgatgtggtagctacccggcttggggtcgggccggtcaagcagtgcgtgcatccccgtgagttccccaccgttcacccgcacgcgggggccgagcgcggggtgcagcgagtagccgacggaagtcaccagcccgcatagcgggctgtaggtgcgccgcctgagccgggctgcggtctcgacggggtcgctatcctggcgaagcttcatcgctcgccccctgccgccagccactcacggatgtcgtagtacaggtccggagcggtttcaacctgcgctggtgcatcaaaacgggacataggtaggacgtcgttgtaggcgatctccatcgtcggtatgtagaccgacaacactttgttgcgcgtcgtgttgaggccgttgcgggcgatgctgacagcctcatgcgcgacgtgcgcggccaagatcgcgcgcaccgacgctgccacggccggcgctccggcccttacgcggtcggcagcggccacccgcatccaggacaggtagctctgccgttcgcgcaggttcatcgcgacccgctgctcgaaggtccggtaggacgaggtcgcaccagggacgacgtagggacccacgtacaaggccggcccgtctacagctgcgtggagccacgacaggtgggcgcgtcgggcgaacaggtcaagggcgcgcagcatagccgggttgttctgcgccagcgctaccacaaggagtggctgcaggtccggcgccgaacccagcaacgccaacatctgggaggcctcctgctccatgtgcaactcgtcggccgactgctcaagccgcaggcctgcgaagagggtggctgatggctgcgtgtcgtcagcgaggacggtagcctgcagcccctctccctcgagaatctgctggatatcgccggcgaggagcgcgtcgtcgctgaatacccacaccgggcgcgtctctctacctccatccatcttgtcctcaacgttttcgaccagcgcaccgatcgatgctaggtgggccatcacgtcgtcaagggccgcgcgggtcaatccgggcacccgggacacgatctcgggcggctgcagtccttggctcaacaagtccaaggccggccacagggtcccggtggcgtcgtcgtcctccagcgttgtgctctcggcgttccagacgcctcgacggaactccaccctgtccatcgagtaaggcaccatcatgaggcccggtgaaatgtggttggtcactttggctcctgtacagcctaggcttggacgcccacggtcatggtgtgggtcgcggtttggaaaatcccgtcgaggttgagtgcctgattgagttcgtcctcgtagaagcttgaggactcgactgaggcaagaccgagccccgtgcagaccaagttgatctgttgtgcgatcgccccgacttcttgaagggcgaacctcaaacccctggctccgtacttccgcatcgccctccacggcgagatgacgaacaccaagtgcactccggccgcatccgattgctccacggccggctcgccggccatcgaattcctcacgccgcgacagccctcttcaccggtcacgggcaccagtcgatcgatgaccggcgagtagcggtagacgccgcgactcaagccggacacccgttgtgcggacatgaagatagacacgggatacagccctccaccagacgggacagcgcgtacattataccgcacgatatcaccgctcgaacgtgggacatccacgtgccccgtcacaccggcagcacctctcagaaacgcagctacgtcacgcaggtctagggattcgccggtgtagttccgtccgctgcgccggcgggcgatcacttgctcgaggggtgcgcgcaccctgctggacctgggaagttcgatcacatcggcagcgaacgtgtcgcgatccatctgtccgtacgtaacgatcatggggtcaacgaaatagtcgccgaccgagacgttgaactccatatccccccgggcgatgcgcgaggcgagcaagaagtctgcagctgcgttagacagccccggcccatcagtgttgtcgcagcggaactcgtgggtccgaaaccccacaccttccgtgcccgggctctgcgctcgatacgacgtgatcgcagaactagccttccttaaaccgcccggagtagctaccatgaccgtcccctctgaggtctcccgaacacttgcgacaatagcagcatgtgggggcagccgccagaggcgggcatccttgtctcgacaaccattgacctccggattcgatatgtgcataatcatagtcgtgccaacacgaaacgtgtacgtctcggaagacgacctagacctgttcgccgaagccaccgagatcgctggaggcctgtccgcagcggtgttggaggccttgcgcagctacgtagacaggcaccatcgcgcggccggcggattcgacgagatcgagctggagctgcagaacgacggtatcgaccaccgtgtcaccttcatgggtcgccgcctgatacacatccgccgtccagatcccgagggaacccgcatagacactgtctacttgaccgccaaacaccaattcgccgttgccaccaaaatccaacgacggctgccagactggacggccggccacgagcacatctggtccgacccggagacctggaatcgggagttctggatcgcaggtgacaagacgatggccgtgtatcccagccttgacaaactccgcgaagctgaccccaatgtggccgaacgcgccgaggccgcggtcaaaatcccgccgttcgaggtcctggacatctgatgacagaatcatcatcttcccggcggcaattggcaatgccggtgctgtcagtcacggatctagccaagaaatacgtggttcatggcggctacgaggtcccggcactcaacggtgtctcgtttgacctgcacccgggagagatgctgggtttgttcgggccaaacggtgctggaaagacgacgctggtcaggatcatcgcgggcctcttatcggcagattctggagacgtccactggggatcggatcaaggtcgggccaggttaggctacgtgtcccaaaagggtggactgcagtacgggctcacgtgccgggaagagatggtcttccacgcacaatgcttcggccagtccgccaagcaggcccggactagcgtcgacgaggtcgccgcgatgctgcactgcgattacctgatggagtgggacgtcggaaggctctccggtgggcaacgccgaatcatcgaggtagggctagcactcgtcaatcaaccatcggtcgtcctgctcgacgagcccaccctgggcctggaccccgcaacacgcctgtcgttgtggcaaacggtaaagtcggcacgccgtgagaccggtgctgccttcctcgtcaccacccactacattgacgaggtggccgagcacctgtccaacgtcagcgtgatcaaccacggaaccgtcgtcgccaacggctcgccagcgcacatccgagaaatgttcgcgaccggggaagtaacgctcggcgtggccgaggatacggtggacagtgcggtggacgtgttggctgggaccgcgttcgaggcgcaccccaccgaaaccgtcccggggatcgtggtcaggtccaggcatcccgacgtggacgcggccaagatcatcaccatcctggctggtcatggcatctcggtggactccatatccgtacgcgaggcgaccttggaagaggcgtttctcacgatcacaggcagtcgagacccggagaggcaaatcccatgaacacttgcttcaggcgatatgcggcgatgtcgctgagagcgcggcgtgatttggccctgacattcatccagcccctcgtctacctagccctcttcggaccgctcttcgtcacgacgatgaagatgtcgcagagagctaccgccgctacgggttactccctatacatcacgggcctgtccatccaaatggccatgacgatcggtgccttcgcggggctaaccatcatcctcgaataccgactcggcatcctcgaacggatctggagcacccccctcacggggagcaagatgatggcggggcgaatcgcgcgcgacgtcgttatgatgatgatgccgatactggtcgtcttcatcatcggcctggtgctgggaacacgccccagcccactgggcctggcgacctacttcgtgacagtgctcggcacaggagccacgttcgccggggtctcctacgcggtggcactcagaacgaagagcgaggcagcgctatccgcgatcttcaacctcatcctgctacccatcctcctgctgtcggggatcatgctgcccatgtcgttcgcaccacactggatcgccaccgctgcccacgtgaacccgttgtggtacctggtgcaaggcgcgcggaaccagttcagcgttctagggctcgtggcggcggccccatggagttgggctgtggccatcgtcatgtcagccgctgccttcggctgggcaagccacgaattcaacaagaggcgctgacacaaagaatggtgccgggaacccaggtccccggcaccaccgagtgcactcgcgacgtcaacgcaccgttgcggtcactgcgcaggtcgagcacgaggacgacgagcccgcgctgctgcaggtcgagccgccaggcgcgagcaggtcgacgttagcgtcggcgccgccgaagacggacgtgacggccggctgagaggtgcggatgcggtgctccagcgaggaggtggtggtgagtttcatgggaggtgctcctaggagtgagacgagaacaaaccctagcgataggttagcagtccgcaaccgactccgggaatagtagaagcgcgcatccgtagcggaagaccttagcctgattacagtgaccctgttcgcgtctcaacattattccacacccccgagcagcgaacgacaccgcgatgatgatccgtcgcctctccaccgaagaactccgcgcccacatcgcaccgggccgccgtcccgtgcatcagacctgccgtcaacgtcggccatgaagctgggaaggtggctctcgtctaggagcagacgcgggacgcctcctccaggttgggccggggaagtgtccggttcttgatgtaggtggcggtccctattgatgggcgttgaccgtgggaatgcggtcggcgaagggggtggcgaacccgttgagcgcaggcttccagcgcatgcatcaacgctgtctgccggccaccggcaagcctcacccgcccgtcatggccatcatcgaggtgccggtgaatcctcgacacatgatcccaactcccccggaggggcttccggggctgttcagccaccagatcagccaggcggcgagcccgactctgccacccggaccctgcagagcgtgcctgctgccgtcgtgtcgtgtcgggccagtgggccaccagatcggccacatccgtcttggcccatct

SEQ ID NO: 119 - DNA, 9540 bp, Propionibacterium acnes
cggtgtggcggggtgcgcgggtggagagggtgccgcgtgggttgatttccacgacgacgatgtcgtcgtgtcctgctgtggtggcgagggcttgggcaaggatgacggccagcggggttttgccggtgccgcctttgaggttggcgagggtgatgatgtggtcggtgagttgggcgggtgcggcggtgtggtgagggttggcggtgaggttggcgatggtgaacagggcatcgagatcgtcggtggtgttctgctcggtgggttgggggtcgccggagatgatcgggtcggcgcggcgcggctgccatgccggcctcaccactgtcacgaccaccacgggtctgctggcgctgtgtgggtgtcgtcggcgatgactcacgatcggcagtctcaccatcgtctcggtgatgctcggctagcgctggacccggtcaagttcgggccggctcacccagtggtgatgactcggtcacagaaccgctgccggtcgttatctcggacgtctcgactcctccagtcctgatgggcgttggagccacctacacctactctcagaacgaccccgacctcgtgtggggcgggggcagatgtcacttgggccaatcgagagcccaggtgatggggaaagcaggggtgtgatatctgtcctggaaaactgggcagctgctaccgtggattgacggatctccacgaaagaagggaatgcgaccatgcagatcaccgtcaagaccatcaaagatcatcgggttcgcactgtccagaccgccatgagcagcgccttggggattggttcccaggtagacatgctcgcccccggcggttccaccagctcgagttccggttcatgctgctcgtgctcgacctgcgcggtagtggcgcagcctcaagactgaacggctggtcagccccaggggcgtggcgctcatcgcgtcacgccccttctattcgctggacagggtgcgcgagctgaggaacatcgcggtgtgtgcgatgacgaggggcaggagcaagtctgtgcgggttgccaagtagccctgcgcgatggccatcacgctggccccgacggcggcgaagacacctccgatacgtcgcttcatgccgccgaattgcatcaggacgaataggactcccgcggtccacatccctccgggcatgcatctgggaaagatgaaccggaagatgatctcttcacaggagagctggagtactagcagcgtagcccccacggggagactcacctctactgacagacggatcgtcttcatccacccacccgagctggcatcgaccatttcggtggccatgcgcgaccggtggcctcgtgcctctcgctgcgtgtcgatccagccgagcagtccgtggacgctctccgctaggactcctgacgcgacagtctcaccaattcctaagcccacggcgaggaccgcgacgcccccctgcacggcaggctgtgtgacttggtggtcccaccaacccgccggcaggaccatgcgtgcgaggctgcacacgagcaggaggtggagggtcacgacgagcgacatctggaataccgcttgccgttcggcgatggtggcgttgggaaagagcggtaggccggcacgggcagcggcgctcgacagcttccgcaagagcggtttggagacgaagtagtaggcgacgtacagcgccagcgctgtcgcgatgatgatcatcggtctgccaccgagctgacccgccgatagccgtttctgttccaccaatactggctgttgtagatcaggtggcccagaacacaggcccagatcccccagaagatgaacaggatagtccccaaggcggcgagcgggatcttggagaggacctgtccccgtccgaacaccgagtggccgcaagcaaacaagagtgctcccacagcggtgagcgcgagccaggccggggttgctcgcagactgatcaccgggaccccgacccggaagccgacctcttctcctacagcgatgactagcaactgccacagcggcatgttctgaacggagcgcgcgactcgggctcgagtcacccacacgggctgttgagcgctcacatcaccactcaggtaccccggtgaggcacttcgcttagtactggggcccgatgtgcgagcattcgtgatgtgtcgcaggatccggttgtcaagccaagaggccagcagggctccggcgacagtgacgggtagcccgatcagcacgaggccccagccatgcggtgccgagaggtttctggccggcgtgcacgcgaggcaggcaaatgccatcactgccagcactacgacgtagatggtcgcataattcgacttgcgggtgacgttgccgaccatcttggccaaagtcgctggggaccagctgatgagtgcgatggtggtcagcaggaagcaggaccagacagacatccggcgcactcaggggtatgggtgcggctgtgggttttggaaaccgccatatgcggcgtagcgggggtgtgcccgcatgggtgcgctgggcagtgacagggcgagcagcccaggcgcccagagcctgacacagtgcagtcccagcccctggatctctatggtggtgaaatcttcgatgtacaggggtgacacacaggtgatgctgttgaccacgctctttaccagttccgcccccgtgtgggtgtcgtcaggtggcaggtcttcggcttgggcaatggtgcccgcgtcgaatttcgccacaactgattgcgcggcctgatagttcctcgcgtagtaggagacgttcgagtcgaggtcaagcatgtcctccgtggacatactggacgcgtcggcctcggcgtcgaaagacgtccataccgcgagcatccgaaccccgctgcactcgagaaacgccttgtacatggctgcttccagacccgcgtctgcacctaggccgacggcgacgaggggaagttggttgccactaccgaccatcatgcatgccacggtgaaatgcttgagcccgggagtcggaagccagtagaaacgcagttcgtggcttcggcccgctgcacgttccacgagccgctggatgcgctggaggcggggtccttcgacgcggatgcgcacaggtgacgaggctccataccacaggcccatcgcggcatctacctggatcaattcataagccgcggacagcgttgcggcgacgcgtgaagtgtggacggcggtgccggtcgtcacggccgttcccagccacggctcaccgtcgtgccgacgggggttgtaacccaggtaaaagaactgcgccgggatccactcctgccgggaggtcccgacacggggagtcttgacccatgtcatgggcaagtcgtcgcgataggtgtcgaacgcacctccagccactcgttgcgcgaagccgaatgcgcccagatcgagaacttcgtcctcggtccgggcgaggagttcctgacgagtcgcccagcgccgttcgaagggactatggagaatcccggtacccgcgcagtagcgctcgacggcctccgcgtagaccttgatctctgcctcaaactcgttcagccccaccccaccgatgtggtagctacccggcttggggtcgggccggtcaagcagtgcgtgcatccccgtgagttccccaccgttcacccgcacgcgggggccgagcgcggggtgcagcgagtagccgacggaagtcaccagcccgcatagcgggctgtaggtgcgccgcctgagccgggctgcggtctcgacggggtcgctatcctggcgaagcttcatcgctcgccccctgccgccagccactcacggatgtcgtagtacaggtccggagcggtttcaacctgcgctggtgcatcaaaacgggacataggtaggacgtcgttgtaggcgatctccatcgtcggtatgtagaccgacaacactttgttgcgcgtcgtgttgaggccgttgcgggcgatgctgacagcctcatgcgcgacgtgcgcggccaagatcgcgcgcaccgacgctgccacggccggcgctccggcccttacgcggtcggcagcggccacccgcatccaggacaggtagctctgccgttcgcgcaggttcatcgcgacccgctgctcgaaggtccggtaggacgaggtcgcaccagggacgacgtagggacccacgtacaaggccggcccgtctacagctgcgtggagccacgacaggtgggcgcgtcgggcgaacaggtcaagggcgcgcagcatagccgggttgttctgcgccagcgctaccacaaggagtggctgcaggtccggcgccgaacccagcaacgccaacatctgggaggcctcctgctccatgtgcaactcgtcggccgactgctcaagccgcaggcctgcgaagagggtggctgatggctgcgtgtcgtcagcgaggacggtagcctgcagcccctctccctcgagaatctgctggatatcgccggcgaggagcgcgtcgtcgctgaatacccacaccgggcgcgtctctctacctccatccatcttgtcctcaacgttttcgaccagcgcaccgatcgatgctaggtgggccatcacgtcgtcaagggccgcgcgggtcaatccgggcacccgggacacgatctcgggcggctgcagtccttggctcaacaagtccaaggccggccacagggtcccggtggcgtcgtcgtcctccagcgttgtgctctcggcgttccagacgcctcgacggaactccaccctgtccatcgagtaaggcaccatcatgaggcccggtgaaatgtggttggtcactttggctcctgtacagcctaggcttggacgcccacggtcatggtgtgggtcgcggtttggaaaatcccgtcgaggttgagtgcctgattgagttcgtcctcgtagaagcttgaggactcgactgaggcaagaccgagccccgtgcagaccaagttgatctgttgtgcgatcgccccgacttcttgaagggcgaacctcaaacccctggctccgtacttccgcatcgccctccacggcgagatgacgaacaccaagtgcactccggccgcatccgattgctccacggccggctcgccggccatcgaattcctcacgccgcgacagccctcttcaccggtcacgggcaccagtcgatcgatgaccggcgagtagcggtagacgccgcgactcaagccggacacccgttgtgcggacatgaagatagacacgggatacagccctccaccagacgggacagcgcgtacattataccgcacgatatcaccgctcgaacgtgggacatccacgtgccccgtcacaccggcagcacctctcagaaacgcagctacgtcacgcaggtctagggattcgccggtgtagttccgtccgctgcgccggcgggcgatcacttgctcgaggggtgcgcgcaccctgctggacctgggaagttcgatcacatcggcagcgaacgtgtcgcgatccatctgtccgtacgtaacgatcatggggtcaacgaaatagtcgccgaccgagacgttgaactccatatccccccgggcgatgcgcgaggcgagcaagaagtctgcagctgcgttagacagccccggcccatcagtgttgtcgcagcggaactcgtgggtccgaaaccccacaccttccgtgcccgggctctgcgctcgatacgacgtgatcgcagaactagccttccttaaaccgcccggagtagctaccatgaccgtcccctctgaggtctcccgaacacttgcgacaatagcagcatgtgggggcagccgccagaggcgggcatccttgtctcgacaaccattgacctccggattcgatatgtgcataatcatagtcgtgccaacacgaaacgtgtacgtctcggaagacgacctagacctgttcgccgaagccaccgagatcgctggaggcctgtccgcagcggtgttggaggccttgcgcagctacgtagacaggcaccatcgcgcggccggcggattcgacgagatcgagctggagctgcagaacgacggtatcgaccaccgtgtcaccttcatgggtcgccgcctgatacacatccgccgtccagatcccgagggaacccgcatagacactgtctacttgaccgccaaacaccaattcgccgttgccaccaaaatccaacgacggctgccagactggacggccggccacgagcacatctggtccgacccggagacctggaatcgggagttctggatcgcaggtgacaagacgatggccgtgtatcccagccttgacaaactccgcgaagctgaccccaatgtggccgaacgcgccgaggccgcggtcaaaatcccgccgttcgaggtcctggacatctgatgacagaatcatcatcttcccggcggcaattggcaatgccggtgctgtcagtcacggatctagccaagaaatacgtggttcatggcggctacgaggtcccggcactcaacggtgtctcgtttgacctgcacccgggagagatgctgggtttgttcgggccaaacggtgctggaaagacgacgctggtcaggatcatcgcgggcctcttatcggcagattctggagacgtccactggggatcggatcaaggtcgggccaggttaggctacgtgtcccaaaagggtggactgcagtacgggctcacgtgccgggaagagatggtcttccacgcacaatgcttcggccagtccgccaagcaggcccggactagcgtcgacgaggtcgccgcgatgctgcactgcgattacctgatggagtgggacgtcggaaggctctccggtgggcaacgccgaatcatcgaggtagggctagcactcgtcaatcaaccatcggtcgtcctgctcgacgagcccaccctgggcctggaccccgcaacacgcctgtcgttgtggcaaacggtaaagtcggcacgccgtgagaccggtgctgccttcctcgtcaccacccactacattgacgaggtggccgagcacctgtccaacgtcagcgtgatcaaccacggaaccgtcgtcgccaacggctcgccagcgcacatccgagaaatgttcgcgaccggggaagtaacgctcggcgtggccgaggatacggtggacagtgcggtggacgtgttggctgggaccgcgttcgaggcgcaccccaccgaaaccgtcccggggatcgtggtcaggtccaggcatcccgacgtggacgcggccaagatcatcaccatcctggctggtcatggcatctcggtggactccatatccgtacgcgaggcgaccttggaagaggcgtttctcacgatcacaggcagtcgagacccggagaggcaaatcccatgaacacttgcttcaggcgatatgcggcgatgtcgctgagagcgcggcgtgatttggccctgacattcatccagcccctcgtctacctagccctcttcggaccgctcttcgtcacgacgatgaagatgtcgcagagagctaccgccgctacgggttactccctatacatcacgggcctgtccatccaaatggccatgacgatcggtgccttcgcggggctaaccatcatcctcgaataccgactcggcatcctcgaacggatctggagcacccccctcacggggagcaagatgatggcggggcgaatcgcgcgcgacgtcgttatgatgatgatgccgatactggtcgtcttcatcatcggcctggtgctgggaacacgccccagcccactgggcctggcgacctacttcgtgacagtgctcggcacaggagccacgttcgccggggtctcctacgcggtggcactcagaacgaagagcgaggcagcgctatccgcgatcttcaacctcatcctgctacccatcctcctgctgtcggggatcatgctgcccatgtcgttcgcaccacactggatcgccaccgctgcccacgtgaacccgttgtggtacctggtgcaaggcgcgcggaaccagttcagcgttctagggctcgtggcggcggccccatggagttgggctgtggccatcgtcatgtcagccgctgccttcggctgggcaagccacgaattcaacaagaggcgctgacacaaagaatggtgccgggaacccaggtccccggcaccaccgagtgcactcgcgacgtcaacgcaccgttgcggtcactgcgcaggtcgagcacgaggacgacgagcccgcgctgctgcaggtcgagccgccaggcgcgagcaggtcgacgttagcgtcggcgccgccgaagacggacgtgacggccggctgagaggtgcggatgcggtgctccagcgaggaggtggtggtgagtttcatgggaggtgctcctaggagtgagacgagaacaaaccctagcgataggttagcagtccgcaaccgactccgggaatagtagaagcgcgcatccgtagcggaagaccttagcctgattacagtgaccctgttcgcgtctcaacattattccacacccccgagcagcgaacgacaccgcgatgatgatccgtcgcctctccaccgaagaactccgcgcccacatcgcaccgggccgccgtcccgtgcatcagacctgccgtcaacgtcggccatgaagctgggaaggtggctctcgtctaggagcagacgcgggacgcctcctccaggttgggccggggaagtgtccggttcttgatgtaggtggcggtccctattgatgggcgttgaccgtgggaatgcggtcggcgaagggggtggcgaacccgttgagcgcaggcttccagcgcatgcatcaacgctgtctgccggccaccggcaagcctcacccgcccgtcatggccatcatcgaggtgccggtgaatcctcgacacatgatcccaactcccccggaggggcttccggggctgttcagccaccagatcagccaggcggcgagcccgactctgccacccggaccctgcagagcgtgcctgctgccgtcgtgtcgtgtcgggccagtgggccaccagatcggccacatccgtcttggcccatctccagcccgccagacccagggaggccatcacctcatcgacgccgcgccgggtggtctcatcaaccccgtcaaacagctcgggccacctcgatgatgccgtccgtgaacgatccagattcatgacatgctcctcttcacagatgccgacgacgatcaggccgtggccgtggcaacggggtgacctgccggcgcggctcacgacgttgagccggaaccacacgagacgcaccagtgtgctgcgccgtcttgagtcgggcgctgtactgggccctggcgctgtggtgaacagcccgacgaagcaccgaccgccggctgtcctcatcgccagggcgaggcatggggcgcggcatggtgcgcccggtagcagcatccatgagggtgatccggtcagccaaaatgccgagccggttttcccacttccggggccacggcaccagcaggtcacgctgacagcccacgccgtggcgtcggcagtccacaacattttctcacggccaggatgcgagtgcagcagctccaccggaacaccagcatcacgcacccgccgcatcgtgacctcatcctcacg

SEQ ID NO: 120 - DNA, 1583 bp, Propionibacterium acnes
accagatcggccacatccgtcttggcccatctccagcccgccagacccagggaggccatcacctcatcgacgccgcgccgggtggtctcatcaaccccgtcaaacagctcgggccacctcgatgatgccgtccgtgaacgatccagattcatgacatgctcctcttcacagatgccgacgacgatcaggccgtggccgtggcaacggggtgacctgccggcgcggctcacgacgttgagccggaaccacacgagacgcaccagtgtgctgcgccgtcttgagtcgggcgctgtactgggccctggcgctgtggtgaacagcccgacgaagcaccgaccgccggctgtcctcatcgccagggcgaggcatggggcgcggcatggtgcgcccggtagcagcatccatgagggtgatccggtcagccaaaatgccgagccggttttcccacttccggggccacggcaccagcaggtcacgctgacagcccacgccgtggcgtcggcagtccacaacattttctcacggccaggatgcgagtgcagcagctccaccggaacaccagcatcacgcacccgccgcatcgtgacctcatcctcacgctgccgatcaccgtcaaccagatggtcagccacgatggtgttcacaccccatgactcatgcagttgcctggccaaggcgcccaacacctgctgacgcacctgtgacttgacgtcatcatcctccagatcctgtgtaccaaccatcacggaggccaacacatcactgcgttgctgaaccagggtgttgacgacgtcgacatcgtcgatacccatgggattgttggcgcgcgcggccacggcatgaaacgtgttggactgcaaattctcgaccagaccacgccgatagtcgttgaactgggaggtgtcggcaatgacaccggtcatgatgtaggccgacccctcggacaaggccctgtaggactcgtcgacgaacgccaccaaccccggccgccgccggtaaagtcgacctgcttcctcgtcagccagcaaccatgacagtttttgccccatatgtcctccttgctgacatgacctcgaacatggtaaactttccgtaggaaaaacggggcaagtactttcgagcggctacctcggcccccggtgggctgtccagccttgtgcggaccgaagccgggggattccttatgtttgcggcaatgatgccgctgcaccccctcatgccgtggtgtggtcctttccccgtgtgcggtgtggtgcgtcgttgactggtttgtggccccgagccttactctgaccggtaggagaacggtgtggggtctacggatagcccactcggctcccggtggaatgtccaacagggtagggttgatgagttggtccatcaggaccgtcccggtggctgcgtcaatgatcgatatttcgatgatgcgcccgtccaggtcggtggtttcggtgtcgaggatgactccgactccgggttctaggagttggggatccaatgggtggtcatcgtgtggctcctacagggagtgtctgggctggacagcggtgcaatacccgcgccatagcggttttttctgcggg

SEQ ID NO: 121 - DNA, 6610 bp, Propionibacterium acnes
gtgttccagtgcctcgcgggcgtgatgttcttcttcggcaccttcttgccacatgcttcgcgcttcagcctcgccatccaagcgaacctggactgtgaacgagtcctcatcgggtccgtcctcattccacgcggcaatgatcccacgggcctcgtctgcgacctgactcaacttcatcgcctgcccgacagccccgagagccggaatctcgaacacccagatattcgcctcagccgagacctcacgatgggcgatcacttcgtaggtcgtctcaccttctactgtcgtgtccattacttccactccttcggaattttcacgcctgctcgctccagctgtgccaggacaccaactgacgtcagctggtgtcctgctggtatcgatacgcgcccggctccgccggggcgtccccagatttcatggcttcccttggcgttccgcagacgggcccatccttgagaacggagcagcttgaggacgtccttagttttctgcggtttcacacatcatagtatagccccacttaacttgtaaactaagcccctgtttacattttagttggtgcatgtgatccctgctcttatgacgtcgcccgacctggcgccttagacatgcactgttcatcctcaaccacactcaccgtcacgggtccgaaggcgaggtctatcaccattcgcatcgatgaagttgaagcaggatcgtccgcatcacgcactgccgatccggacagacgccaccggccgtaccgactgtttacgatctgccaccgcagactgctgccataaccgctatcacctctgatagtacgtttagtactatcagaggtgattcaagattctcctgtcgagcagccctacagtcacgaagtcctgcgatcgtcatcgcttaaggcagacggatggccatcggggaccactcgcaaagcaggggcgatcagcaacagtgatgtgccatgagcaagtactggtgcaccggctgtttactccgcccctagataaaccacgggtgcaggggtggacaccacaccatgaccgatgtggtgcccaccccatggctcacaggcaggccctatcgccgggagcactgctgcagatgaggctcagtaacctgccatgtctcacctggggccaaggtgccaagctccccacggaatctcaggcatcggaaaccagcagccgaacttccacagcatgagcgccctacgaaaaagcaggccgccgacggttctcaagaactcgccggcggcctgcatcgccactcgaactgtaaccgtggtccgaccccgtgcacaggtaagctccacactcccaccaggcatggccgaggcagtaccaagttgccgtggcccatcggcagatttggttaaattttgaaaagtcatatagactccttctgtaaatttttaaatctcataggactctcgccatcgccagccagcttcgacaggagtcccgatgtttcaccgagtgaaatatcggcaccgtttgagttgacctaaagctcaaaagatgctagaatccatcttacctcgttaggggcgttttgtcaaacgcccctatattgcgtgtcttcgcgcgtcgtagcgctgatgctgcgcctgtgtcgactatccgtttgtaagtactttcgatgacaccagcagtggctactcatgactggtgcgtgcgggtctaaagcagcagggaaaggaatcgcagtagaagccgcttgattcctatcacccctgatggtactatcagtactaacagagcagggcttactcgatgcgtgagaatcggggacatgctgagcctctcgtaggtcattggcctgctgggcgtcagtgtggcgcggttcgatccagtgaactctatcagctctgttagtactgtcagagttgatatattcgaccccaggaggagcccatgagttacatcgttcgcaccggaaatttggtcgacacccccgagctgcgtgagggagagcatggcccgtacacctacgctcgcgtcatcgtgtccgatcgcattcgccaggaggacggcagctacgtcaacgggccagcgatcgcctacgacgtcttggcgggtggcagccaagccgtgaatctggttgaagccgccaaggcgagcggcaacatccgcatcatgttcgcgggccgttaccgcgtcaccgagtggcggggtgagcagggcactcgtatccagcatgaggtccgagccgacgaagtgagcgtgagcctgctcggtcagagggtgaccgtggagcggcctcgaggtgacgtggcatccaaggagagcacgtcgttctgattgagtccgggggcacggtggtcgccgtggtaaaccgtgcccctgacagtactattgacactattggaggtatcagtgtgactgctcaaattttcgccttgtgcaaccagaagggtggcgtcggaaagtcgacatcgacgtttcatctggcccgtgccgcggtgttgcgtggccagcgtgtgcttgtcgtcgacaacgacccccagggcaacctgacgtctgtcgcggccgccgagcccgtgggggaggatcaggcggggctggccgatgtgctcagcgcgcgtgctccagagaccctccgcgatgtgatcgtgccgggaatctggtctggcctcgatgtcgtgccgacgtctggcatcacgctcggctgggtgcgtgacgaactcgtgatcgccggtgccggccgagaaggccggctgcgggaggccctggccggcgtcgaggacgactacgacgtgatcctgatcgactgtgctccatcgctcgatcagctcacgatcaacggcctggtggccgcccagggtgtcatcgtcgtgacgcactcgaagttgtggagcgccaacggcctcgcccagctgctcgacaccatcgacagcgtgcgcagctactacaacggcgcgctgcgcgtggcgggcatcatcgtcaaccagcacgaggagaacaccatcagcgggaaaacctggctcgacgagctgcatcaggctgccgagtcccggaagctgaccgtgcttgacccgccgatccccaagcgtgtcgtcatcgccgataccgtcgaggccgcgcgcggtctcgacgagtggggaagtgccgaggcggccgcgctcggccagttgtacgcccaccacctgacctgcatcgaaggagccctgtgatgacccgtccagccccccgaaagtcctcattgagcggatcaactccggtcgccccgccggctcagacggcgccggcaccgtctgccgcacctaccccccacaaggccgatgagtcacagacgagcagcaccacgaggaagtggcggcacaaggtgtcgttctaccaggacccggccgacaccgaccgggtgcgcggggcgatcctttacacgatgacgaccgagggcaaccggaacctgagccagttcgtcaacgatgccgtcatggccaaggtggtcgagctggaagtcaagtacaacgatggccagccattccccgctgtgggagcccgaggactaccccagggcggtgcagccgccgccggtgagtagaggaccatcgaccgtcgggggcttcaccatgcccccgaccctcggtcatcctgatcctcttgtcgatggtggtgacagtgggggattcacgcctcgttcagatcagaggaagtctcaccgcgtgattagtactatcaaatctgacagtactaacagagcagatagggttccctaggtcgagctgtatcacgccgacaaccagtgagccagtgatctacgaggggcgcaatatgcacccgatcggtagccgcgaaggcctcgccctgccccgatagtactatcaccactatcaatggtgctagtggtgagtttcttccattgatgacaacagcacagtgctgccgtctgtgtgcgggccaccagcccgcacacagttgccgtcgaggacgttgttcatgctctgtggtggccggtcctgagggcggctcgcaggatctcccggcgctcacggcgacgagcctggtagccaaggtctgcatgttcggcggcgagacgggctttgagggttgcggcttctgcacggcggtggagttggtcgtcgatgagttgggcgcgggccagacgccgcttatgggggttgtcgtgggtgaggggggcgtcgaggctgccgtcgtgggttagggccagggctgctcgttcggcgtcgtcgaggccgatgtggtggacggtcacgggtgcggtggtgacgtcgaggatgtccaggtggatgttgtggccgccgccgggggcttcggggaagtctggtgggctggcctggccggtgtcggggtcataccaggacaggccgatgatctcggcccagggtgggggcgggcagacggctcgcagaagggtgtgggccaggaacgtgttgcgggccatgatgcctccaagggtgaaaagcagtcgagtagcgatgacggcggggtagccgtctgctgggctgaggccgaccgggcccatgtcctcgatgctcttgtgctgcggccataccccaaagctaccaaacagtctttttaatctcaaagatacaaacagtgcttgacatattatctgcagcgaaagatactttcatcatggtggctgatcatgattacgcgactcctgacgatgagtggatgacacctcctcaggtggcccgtgtgattccgaacaccactgctcaggctgtccggcgctgggctgaggagggtcagcttcctggggcgtttcgtactccttctgggcgttggcatattccgtggtcggctgtggtgggcatcatggggtttgatccgcgtgagtccgcatcaccgagtgatcgtcaccagagctgacagagtcgtcgatgagctttcgagtgcagagctgatggcacgacggtctggatacttgtggagatgagagacgaccacatccagtcatggtcggggtacaccgaggggcagattcagcagtgctggcacgatgaggttgcccctgccattgactcgctcatggagcaggtaaggtctgttgccgagactcctgtgccgccgggttcgagattttacggcgatgagcagtgggccaagccttttcatccgtctactgcgatctgcggttcaatgggtccgccagcgatcacttgcacgcgctgaagctcctcgtctgggaagcgaacgtccaccatgtctatgcgccgtacacccttgctcgtgcatctattgaggcatcgtctactgctgtgtggctgttgagcacgaagacgcgcggagaacgtgtgctgcgagccttgcgatggtacgcgcaggattgtcacgactcgtgcaggttcatggatgatgagcagtatcgtgaccacctattgcggcgcattgaggggactgtcgctgcgggaaatctcgactcgcgcgctgctaggaaacggtaccgtgcaaccgatgttgtcgatgaggctgatcagctggttcccggaactctgagggcgtggcgagctttttctggtatggcccattcccgtatgtgggcatccagggggctgctcgacatggaagtgctgtccagtggccaaggaatggttacggcgaaggtgacgagcggatcggcccaaatcctttgggccgtcgtggcagctctgaatgttgctctcagtgccgctcgcttgtggcgtgattcgatgtgctcaccgtttgctgttgcccagtcggtagacgcgatgccagaggcgtttcgccgccctgtttagggtctgatcggggtagtgggtgttcacggggtcccaggttggccatggggcggcttggtgatgtgagttgggttgtgtggcagcctgggtgttgggtgtggcttcgttggccacgaaggcatgctcttccttgtgctgggacttgagtccccagtgctctcccctttgctagtggggggtggggtccccggaggtaggtcctccggggactttttctatgtctgtccgtgccccaggatttcgtatctaggcagtaccaattttgggttagttggaggtttctttggtaatggacagggtgagggtgatgaagaggtggccgtccttggtggcagaaattttctcgaacttcagctgaatgttgttatcagccactatctgttgggcggtgaggtgctcggagagcttctggaatccttcgcggatccacaggttgtaggggttggtgaccgagaccgaagggtatgggtcgaccttcagcgtcaggactggctggtctgggttgagggagttgatcttcaccagtttggggtaccggtcgcactcatgtgtctcttgtgttgggggccagcagtcgggggcccattcctcccagtggtcacgcatctcacgaagtactttcctgcatctcagcctctgcaggagctcgcgcgccaccgatgggagggctgccatgatgagggcaaggactgcgaacccgatgatgtaattgaccgtgtccctcgtcacgccgttcttgccgaggattccgatggcgaacgcgatgacgacaccgcccaggcacaggtgcatggggtcatgctgtgatggtttttcttcttcagcgactggtggggctatagtcatgtgtgccccttagtactaagtgatactggtgggttgcttttcccc

SEQ ID NO: 122 - DNA, 4467 bp, Propionibacterium acnes
cgcgcgcggtctcgacgagtggggaagtgccgaggcggccgcgctcggccagttgtacgcccaccacctgacctgcatcgaaggagccctgtgatgacccgtccagccccccgaaagtcctcattgagcggatcaactccggtcgccccgccggctcagacggcgccggcaccgtctgccgcacctaccccccacaaggccgatgagtcacagacgagcagcaccacgaggaagtggcggcacaaggtgtcgttctaccaggacccggccgacaccgaccgggtgcgcggggcgatcctttacacgatgacgaccgagggcaaccggaacctgagccagttcgtcaacgatgccgtcatggccaaggtggtcgagctggaagtcaagtacaacgatggccagccattccccgctgtgggagcccgaggactaccccagggcggtgcagccgccgccggtgagtagaggaccatcgaccgtcgggggcttcaccatgcccccgaccctcggtcatcctgatcctcttgtcgatggtggtgacagtgggggattcacgcctcgttcagatcagaggaagtctcaccgcgtgattagtactatcaaatctgacagtactaacagagcagatagggttccctaggtcgagctgtatcacgccgacaaccagtgagccagtgatctacgaggggcgcaatatgcacccgatcggtagccgcgaaggcctcgccctgccccgatagtactatcaccactatcaatggtgctagtggtgagtttcttccattgatgacaacagcacagtgctgccgtctgtgtgcgggccaccagcccgcacacagttgccgtcgaggacgttgttcatgctctgtggtggccggtcctgagggcggctcgcaggatctcccggcgctcacggcgacgagcctggtagccaaggtctgcatgttcggcggcgagacgggctttgagggttgcggcttctgcacggcggtggagttggtcgtcgatgagttgggcgcgggccagacgccgcttatgggggttgtcgtgggtgaggggggcgtcgaggctgccgtcgtgggttagggccagggctgctcgttcggcgtcgtcgaggccgatgtggtggacggtcacgggtgcggtggtgacgtcgaggatgtccaggtggatgttgtggccgccgccgggggcttcggggaagtctggtgggctggcctggccggtgtcggggtcataccaggacaggccgatgatctcggcccagggtgggggcgggcagacggctcgcagaagggtgtgggccaggaacgtgttgcgggccatgatgcctccaagggtgaaaagcagtcgagtagcgatgacggcggggtagccgtctgctgggctgaggccgaccgggcccatgtcctcgatgctcttgtgctgcggccataccccaaagctaccaaacagtctttttaatctcaaagatacaaacagtgcttgacatattatctgcagcgaaagatactttcatcatggtggctgatcatgattacgcgactcctgacgatgagtggatgacacctcctcaggtggcccgtgtgattccgaacaccactgctcaggctgtccggcgctgggctgaggagggtcagcttcctggggcgtttcgtactccttctgggcgttggcatattccgtggtcggctgtggtgggcatcatggggtttgatccgcgtgagtccgcatcaccgagtgatcgtcaccagagctgacagagtcgtcgatgagctttcgagtgcagagctgatggcacgacggtctggatacttgtggagatgagagacgaccacatccagtcatggtcggggtacaccgaggggcagattcagcagtgctggcacgatgaggttgcccctgccattgactcgctcatggagcaggtaaggtctgttgccgagactcctgtgccgccgggttcgagattttacggcgatgagcagtgggccaagccttttcatccgtctactgcgatctgcggttcaatgggtccgccagcgatcacttgcacgcgctgaagctcctcgtctgggaagcgaacgtccaccatgtctatgcgccgtacacccttgctcgtgcatctattgaggcatcgtctactgctgtgtggctgttgagcacgaagacgcgcggagaacgtgtgctgcgagccttgcgatggtacgcgcaggattgtcacgactcgtgcaggttcatggatgatgagcagtatcgtgaccacctattgcggcgcattgaggggactgtcgctgcgggaaatctcgactcgcgcgctgctaggaaacggtaccgtgcaaccgatgttgtcgatgaggctgatcagctggttcccggaactctgagggcgtggcgagctttttctggtatggcccattcccgtatgtgggcatccagggggctgctcgacatggaagtgctgtccagtggccaaggaatggttacggcgaaggtgacgagcggatcggcccaaatcctttgggccgtcgtggcagctctgaatgttgctctcagtgccgctcgcttgtggcgtgattcgatgtgctcaccgtttgctgttgcccagtcggtagacgcgatgccagaggcgtttcgccgccctgtttagggtctgatcggggtagtgggtgttcacggggtcccaggttggccatggggcggcttggtgatgtgagttgggttgtgtggcagcctgggtgttgggtgtggcttcgttggccacgaaggcatgctcttccttgtgctgggacttgagtccccagtgctctcccctttgctagtggggggtggggtccccggaggtaggtcctccggggactttttctatgtctgtccgtgccccaggatttcgtatctaggcagtaccaattttgggttagttggaggtttctttggtaatggacagggtgagggtgatgaagaggtggccgtccttggtggcagaaattttctcgaacttcagctgaatgttgttatcagccactatctgttgggcggtgaggtgctcggagagcttctggaatccttcgcggatccacaggttgtaggggttggtgaccgagaccgaagggtatgggtcgaccttcagcgtcaggactggctggtctgggttgagggagttgatcttcaccagtttggggtaccggtcgcactcatgtgtctcttgtgttgggggccagcagtcgggggcccattcctcccagtggtcacgcatctcacgaagtactttcctgcatctcagcctctgcaggagctcgcgcgccaccgatgggagggctgccatgatgagggcaaggactgcgaacccgatgatgtaattgaccgtgtccctcgtcacgccgttcttgccgaggattccgatggcgaacgcgatgacgacaccgcccaggcacaggtgcatggggtcatgctgtgatggtttttcttcttcagcgactggtggggctatagtcatgtgtgccccttagtactaagtgatactggtgggttgcttttccccggtggccgtgtgcaagacggccaccggggttttccttcatgttcctgattttatctgcccggtgtggcgttttcatctttgtgtgggtggttcgcctggggtcttggagtgtggtgacgcggtgatggtcacggtgacggtgactgtggcgcgtggcgggtgaggtggttctttcctggtctggtgtgtggcccaggtgagtgtggtgatgagggccagggtgaggatgatgaccagggtggggagtagtttgtctggccggtgtcgccgggcttggtggcgcggcatgtttttccagggtgtgtctccgaacaggtcgtcgtcggaggggtcgtcgtggttcatagggtggccttggcgatggtggtgggcgagtttggtccaggtgatggtgccgtcggaggcgatgtggcggtcggcgggcagggtgtggacggtccatccggcgtcggtgagggcggtggtgaaggatttcttgatggatcgtttgggtaggtcgatgggggcgtgggtgccgacccagatgcaccggtttttgaggtgggtggcgccgaggtggttcatgtcgcggaccatgttttgggtgagtgtgagggtgtcggggtcccattggacggggatgatgatgtggtctgcgatggtgatggcgtgttgccaggcggcgtcgaggtcgttgtttccggtgtcgaggatgatgacgtggaagcggcttcttagggcggtgatgatgcggtcgaggtcgtcggcggtggggggtgtgatgaggctgttgtggttgtcggtgatggtgggtaggcatgtgatggtggcccagccttctggttgccaggagatgtaggggccgaggtcgcggggttgggaggcgaatcctgggtgacgggctgcgcgggcgaggtcgatgacggtgttgtcggtgtggcggggtg

SEQ ID NO: 123 - DNA, 3927 bp, Propionibacterium acnes
gtgttccagtgcctcgcgggcgtgatgttcttcttcggcaccttcttgccacatgcttcgcgcttcagcctcgccatccaagcgaacctggactgtgaacgagtcctcatcgggtccgtcctcattccacgcggcaatgatcccacgggcctcgtctgcgacctgactcaacttcatcgcctgcccgacagccccgagagccggaatctcgaacacccagatattcgcctcagccgagacctcacgatgggcgatcacttcgtaggtcgtctcaccttctactgtcgtgtccattacttccactccttcggaattttcacgcctgctcgctccagctgtgccaggacaccaactgacgtcagctggtgtcctgctggtatcgatacgcgcccggctccgccggggcgtccccagatttcatggcttcccttggcgttccgcagacgggcccatccttgagaacggagcagcttgaggacgtccttagttttctgcggtttcacacatcatagtatagccccacttaacttgtaaactaagcccctgtttacattttagttggtgcatgtgatccctgctcttatgacgtcgcccgacctggcgccttagacatgcactgttcatcctcaaccacactcaccgtcacgggtccgaaggcgaggtctatcaccattcgcatcgatgaagttgaagcaggatcgtccgcatcacgcactgccgatccggacagacgccaccggccgtaccgactgtttacgatctgccaccgcagactgctgccataaccgctatcacctctgatagtacttttagtactatcagaggtgattcaagattctcctgtcgagcagccctacagtcacgaagtcctgcgatcgtcatcgcttaaggtagacggatggccatcggggaccactcgcaaagcaggggcgatcagcaacagtgatgtgccatgagcaagtactggtgcaccggctgtttactccgcccctagataaaccacgggtgcaggggtggacaccacaccatgaccgatgtggtgcccaccccatggctcacaggcaggccctatcgccgggagcactgctgcagatgaggctcagtaacctgccatgtctcacctggggccaaggtgccaagctccccacggaatctcaggcatcggaaaccagcagccgaacttccacagcatgagcgccctacgaaaaagcaggccgccgacggttctcaagaactcgccggcggcctgcatcgccactcgaactgtaaccgtggtccgaccccgtgcacaggtaagctccacactcccaccaggcatggccgaggcagtaccaagttgccgtggcccatcggcagatttggttaaattttgaaaagtcatatagactccttctgtaaatttttaaatctcataggactctcgccatcgccagccagcttcgacaggagtcccgatgtttcaccgagtgaaatatcggcaccgtttgagttgacctaaagctcaaaagatgctagaatccatcttacctcgttaggggcgttttgtcaaacgcccctatattgcgtgtcttcgcgcgtcgtagcgctgatgctgcgcctgtgtcgactatccgtttgtaagtactttcgatgacaccagcagtggctactcatgactggtgcgtgcgggtctaaagcagcagggaaaggaatcgcagtagaagccgcttgattcctatcacccctgatggtactatcagtactaacagagcagggcttactcgatgcgtgagaatcggggacatgctgagcctctcgtaggtcattggcctgctgggcgtcagtgtggcgcggttcgatccagtgaactctatcagctctgttagtactgtcagagttgatatattcgaccccaggaggagcccatgagttacatcgttcgcaccggaaatttggtcgacacccccgagctgcgtgagggagagcatggcccgtacacctacgctcgcgtcatcgtgtccgatcgcattcgccaggaggacggcagctacgtcaacgggccagcgatcgcctacgacgtcttggcgggtggcagccaagccgtgaatctggttgaagccgccaaggcgagcggcaacatccgcatcatgttcgcgggccgttaccgcgtcaccgagtggcggggtgagcagggcactcgtatccagcatgaggtccgagccgacgaagtgagcgtgagcctgctcggtcagagggtgaccgtggagcggcctcgaggtgacgtggcatccaaggagagcacgtcgttctgattgagtccgggggcacggtggtcgccgtggtaaaccgtgcccctgacagtactattgacactattggaggtatcagtgtgactgctcaaattttcgccttgtgcaaccagaagggtggcgtcggaaagtcgacatcgacgtttcatctggcccgtgccgcggtgttgcgtggccagcgtgtgcttgtcgtcgacaacgacccccagggcaacctgacgtctgtcgcggccgccgagcccgtgggggaggatcaggcggggctggccgatgtgctcagcgcgcgtgctccagagaccctccgcgatgtgatcgtgccgggaatctggtctggcctcgatgtcgtgccgacgtttggcatcacgctcggctgggtgcgtgacgaactcgtgatcgccggtgccggccgagaaggccggctgcgggaggccctggccggcgtcgaggacgactacgacgtgatcctgatcgactgtgctccatcgctcgatcagctcacgatcaacggcctggtggccgcccagggtgtcatcgtcgtgacgcactcgaagttgtggagcgccaacggcctcgcccagctgctcgacaccatcgacagcgtgcgcagctactacaacggcgcgctgcgcgtggcgggcatcatcgtcaaccagcacgaggagaacaccatcagcgggaaaacctggctcgacgagctgcatcaggctgccgagtcccggaagctgaccgtgcttgacccgccgatccccaagcgtgtcgtcatcgccgataccgtcgaggccgcgcgcggtctcgacgagtggggaagtgccgaggcggccgcgctcggccagttgtacgcccaccacctgacctgcatcgaaggagccctgtgatgacccgtccagccccccgaaagtcctcattgagcggatcaactccggtcgccccgccggctcagacggcgccggcaccgtctgccgcacctaccccccacaaggccgatgagtcacagacgagcagcaccacgaggaagtggcggcacaaggtgtcgttctaccaggacccggccgacaccgaccgggtgcgcggggcgatcctttacacgatgacgaccgagggcaaccggaacctgagccagttcgtcaacgatgccgtcatggccaaggtggtcgagctggaagtcaagtacaacgatggccagccattccccgctgtgggagcccgaggactaccccagggcggtgcagccgccgccggtgagtagaggaccatcgaccgtcgggggcttcaccatgcccccgaccctcggtcatcctgatcctcttgtcgatggtggtgacagtgggggattcacgcctcgttcagatcagaggaagtctcaccgcgtgattagtactatcaaatctgacagtactaacagagcagatagggttccctaggtcgagctgtatcacgccgacaaccagtgagccagtgatctacgaggggcgcaatatgcacccgatcggtagccgcgaaggcctcgccctgccccgatagtactatcaccactatcaatggtgctagtggtgagtttcttccattgatgacaacagcacagtgctgccgtctgtgtgcgggccaccagcccgcacacagttgccgtcgaggacgttgt

SEQ ID NO: 124 - DNA, 3842 bp, Propionibacterium acnes
cactccggccgcatccgattgctccacggccggctcgccggccatcgaattcctcacgccgcgacagccctcttcaccggtcacgggcaccagtcgatcgatgaccggcgagtagcggtagacgccgcgactcaagccggacacccgttgtgcggacatgaagatagacacgggatacagccctccaccagacgggacagcgcgtacattataccgcacgatatcaccgctcgaacgtgggacatccacgtgccccgtcacaccggcagcacctctcagaaacgcagctacgtcacgcaggtctagggattcgccggtgtagttccgtccgctgcgccggcgggcgatcacttgctcgaggggtgcgcgcaccctgctggacctgggaagttcgatcacatcggcagcgaacgtgtcgcgatccatctgtccgtacgtaacgatcatggggtcaacgaaatagtcgccgaccgagacgttgaactccatatccccccgggcgatgcgcgaggcgagcaagaagtctgcagctgcgttagacagccccggcccatcagtgttgtcgcagcggaactcgtgggtccgaaaccccacaccttccgtgcccgggctctgcgctcgatacgacgtgatcgcagaactagccttccttaaaccgcccggagtagctaccatgaccgtcccctctgaggtctcccgaacacttgcgacaatagcagcatgtgggggcagccgccagaggcgggcatccttgtctcgacaaccattgacctccggattcgatatgtgcataatcatagtcgtgccaacacgaaacgtgtacgtctcggaagacgacctagacctgttcgccgaagccaccgagatcgctggaggcctgtccgcagcggtgttggaggccttgcgcagctacgtagacaggcaccatcgcgcggccggcggattcgacgagatcgagctggagctgcagaacgacggtatcgaccaccgtgtcaccttcatgggtcgccgcctgatacacatccgccgtccagatcccgagggaacccgcatagacactgtctacttgaccgccaaacaccaattcgccgttgccaccaaaatccaacgacggctgccagactggacggccggccacgagcacatctggtccgacccggagacctggaatcgggagttctggatcgcaggtgacaagacgatggccgtgtatcccagccttgacaaactccgcgaagctgaccccaatgtggccgaacgcgccgaggccgcggtcaaaatcccgccgttcgaggtcctggacatctgatgacagaatcatcatcttcccggcggcaattggcaatgccggtgctgtcagtcacggatctagccaagaaatacgtggttcatggcggctacgaggtcccggcactcaacggtgtctcgtttgacctgcacccgggagagatgctgggtttgttcgggccaaacggtgctggaaagacgacgctggtcaggatcatcgcgggcctcttatcggcagattctggagacgtccactggggatcggatcaaggtcgggccaggttaggctacgtgtcccaaaagggtggactgcagtacgggctcacgtgccgggaagagatggtcttccacgcacaatgcttcggccagtccgccaagcaggcccggactagcgtcgacgaggtcgccgcgatgctgcactgcgattacctgatggagtgggacgtcggaaggctctccggtgggcaacgccgaatcatcgaggtagggctagcactcgtcaatcaaccatcggtcgtcctgctcgacgagcccaccctgggcctggaccccgcaacacgcctgtcgttgtggcaaacggtaaagtcggcacgccgtgagaccggtgctgccttcctcgtcaccacccactacattgacgaggtggccgagcacctgtccaacgtcagcgtgatcaaccacggaaccgtcgtcgccaacggctcgccagcgcacatccgagaaatgttcgcgaccggggaagtaacgctcggcgtggccgaggatacggtggacagtgcggtggacgtgttggctgggaccgcgttcgaggcgcaccccaccgaaaccgtcccggggatcgtggtcaggtccaggcatcccgacgtggacgcggccaagatcatcaccatcctggctggtcatggcatctcggtggactccatatccgtacgcgaggcgaccttggaagaggcgtttctcacgatcacaggcagtcgagacccggagaggcaaatcccatgaacacttgcttcaggcgatatgcggcgatgtcgctgagagcgcggcgtgatttggccctgacattcatccagcccctcgtctacctagccctcttcggaccgctcttcgtcacgacgatgaagatgtcgcagagagctaccgccgctacgggttactccctatacatcacgggcctgtccatccaaatggccatgacgatcggtgccttcgcggggctaaccatcatcctcgaataccgactcggcatcctcgaacggatctggagcacccccctcacggggagcaagatgatggcggggcgaatcgcgcgcgacgtcgttatgatgatgatgccgatactggtcgtcttcatcatcggcctggtgctgggaacacgccccagcccactgggcctggcgacctacttcgtgacagtgctcggcacaggagccacgttcgccggggtctcctacgcggtggcactcagaacgaagagcgaggcagcgctatccgcgatcttcaacctcatcctgctacccatcctcctgctgtcggggatcatgctgcccatgtcgttcgcaccacactggatcgccaccgctgcccacgtgaacccgttgtggtacctggtgcaaggcgcgcggaaccagttcagcgttctagggctcgtggcggcggccccatggagttgggctgtggccatcgtcatgtcagccgctgccttcggctgggcaagccacgaattcaacaagaggcgctgacacaaagaatggtgccgggaacccaggtccccggcaccaccgagtgcactcgcgacgtcaacgcaccgttgcggtcactgcgcaggtcgagcacgaggacgacgagcccgcgctgctgcaggtcgagccgccaggcgcgagcaggtcgacgttagcgtcggcgccgccgaagacggacgtgacggccggctgagaggtgcggatgcggtgctccagcgaggaggtggtggtgagtttcatgggaggtgctcctaggagtgagacgagaacaaaccctagcgataggttagcagtccgcaaccgactccgggaatagtagaagcgcgcatccgtagcggaagaccttagcctgattacagtgaccctgttcgcgtctcaacattattccacacccccgagcagcgaacgacaccgcgatgatgatccgtcgcctctccaccgaagaactccgcgcccacatcgcaccgggccgccgtcccgtgcatcagacctgccgtcaacgtcggccatgaagctgggaaggtggctctcgtctaggagcagacgcgggacgcctcctccaggttgggccggggaagtgtccggttcttgatgtaggtggcggtccctattgatgggcgttgaccgtgggaatgcggtcggcgaagggggtggcgaacccgttgagcgcaggcttccagcgcatgcatcaacgctgtctgccggccaccggcaagcctcacccgcccgtcatggccatcatcgaggtgccggtgaaccctcgacacatgaccccaccccccccggaggggcttccggggctgttcagccacc

SEQ ID NO: 125 - DNA, 3694 bp, Propionibacterium acnes
cacccgccgcatcgtgacctcatcctcacgtgccaccagcgggggagagcgactaccgctgcagccggtccaaagcgactcttcacagatgagggggtggatcggtagctgacccctaggtcctgatgtgggtcgaggtccttggaatgatggaagttcctacacacccatcgccaaagacctcaacatggacaacgctaccttcaccactccctcatctgtgaagagccagtttatgcacggtgttgaaagaggcgtcggtctacgacgaatgcgggttaatggtcttgcggtgtggggcgctgggcgatggcatcgagaacgcgtgagtgggtggcgatccattcggccgcgtcggggttgatgttgcgggcgacggtgtcgatcgctgttacgtagtgggcaagcctgcgaatctcagcttgttggtcagggtgagcgctgatgagaggctcttgatgggaggcgcggttacggacgtggcggatgagctccacgttttcctcgaagtcgcgtcggctacgccccgggtagtgaggcatacctccgttacgtaagtcagtgagagctttccatacggttgcttccaggcgcggggtgagcagaaagcgccagttgtccagtgacagactcgccacgatctgatcaggggtcgcatcgagcctcgcgcgccgcagtcgcttctcggccctggcgacgttacgcgggaaaccaccgagccgatagctcggggattcccaccaacgccgtatgccagtatcggcgctcaggcgcacgtcaatgaagtttctcaggagtacctcgacatggctgatgtcttccaagaacgctttcgagatgcgggtgttccacacgtaccacgcatcgactggttcgatccggtagcgtctgagcctggcgggtgagaaccactcctgcaacgtctcacgactcaccgtgggagcgtggtaggattgatgacgataggcctcgggaaggtcaatgccgcgaaatatcggtatacccccgaggtcattgttttgcccaggcccctcctcgcatacttgcggggcgtcattggctgccgtcatctcgtctcttcccggtacgtggctgtccatgttcacgggcaggtacggcaatgaggttcccgcacacaaacctctaccaagcatacgctggcaagcccccctctcggccccaccacaacatcaattgctgactcgaacacctttgaggcagcgctttcggcttgcgcaaccccacccacgacaccgtccgcttactactcgaagttgagggattcagaccccacctacaccctcgattgtgaagagcctccaaagcccgatacaacgtctggcgagacaccgtgaacgacctcgccaccgcagcaacgcaccagcagcgcgggatggcttggtattagcccagcgcagggcccccaggcaccagccctaacgaccccgcacccgacgtggctagaggataagccgcacgggaggactccatacccgccgactcattccagcccgccaccagccgagccatatgatcaaccgcccgcggtaaataatccagccactcacgccggtcgtacaaggaaccggccccgctccaggcgtgtgcccaggatcgccacaacacgtcgagctcgaccaccacgcccggaatagattcccactccaaatccggatcagcggccgccacgtaccagatcggccacatccgtcttggcccatctccagcccgccagacccagggaggccatcacctcatcgacgccgcgccgggtggtctcatcaaccccgtcaaacagctcgggccacctcgatgatgccgtccgtgaacgatccagattcatgacatgctcctcttcacagatgccgacgacgatcaggccgtggccgtggcaacggggtgacctgccggcgcggctcacgacgttgagccggaaccacacgagacgcaccagtgtgctgcgccgtcttgagtcgggcgctgtactgggccctggcgctgtggtgaacagcccgacgaagcaccgaccgccggctgtcctcatcgccagggcgaggcatggggcgcggcatggtgcgcccggtagcagcatccatgagggtgatccggtcagccaaaatgccgagccggttttcccacttccggggccacggcaccagcaggtcacgctgacagcccacgccgtggcgtcggcagtccacaacattttctcacggccaggatgcgagtgcagcagctccaccggaacaccagcatcacgcacccgccgcatcgtgacctcatcctcacgctgccgatcaccgtcaaccagatggtcagccacgatggtgttcacaccccatgactcatgcagttgcctggccaaggcgcccaacacctgctgacgcacctgtgacttgacgtcatcatcctccagatcctgtgtaccaaccatcacggaggccaacacatcactgcgttgcagaaccagggtgttgacgacgtcgacatcgtcgatacccatgggattgttggcgcgcgcggccacggcatgaaacgtgttggactgcaaattctcgaccagaccacgccgatagtcgttgaactgggaggtgtcggcaatgacaccggtcatgatgtaggccgacccctcggacaaggccctgtaggactcgtcgacgaacgccaccaaccccggccgccgccggtaaagtcgacctgcttcctcgtcagccagcaaccatgacagtttttgccccatatgtcctccttgctgacatgacctcgaacatggtaaactttccgtaggaaaaacggggcaagtactttcgagcggctacctcggcccccggtgggctgtccagccttgtgcggaccgaagccgggggattccttatgtttgcggcaatgatgccgctgcaccccctcatgccgtggtgtggtcctttccccgtgtgcggtgtggtgcgtcgttgactggtttgtggccccgagccttactctgaccggtaggagaacggtgtggggtctacggatagcccactcggctcccggtggaatgtccaacagggtagggttgatgagttggtccatcaggaccgtcccggtggctgcgtcaatgatcgatatttcgatgatgcgcccgtccaggtcggtggtttcggtgtcgaggatgactccgactccgggttctaggagttggggatccaatgggtggtcatcgtgtggctcctacagggagtgtctgggctggacagcggtgcaatacccgcgccatagcggttttttctgcgggggtgacccacagctggtatttcgttttgacggcgatttggcgggccacgtagtcgcatctgtaggccttgttagggggtagccaggtcgctgcatccctgtctcgtttggcctcattagcgggtccgtcgacagccagcaagttcaacgggtcgttggccagggcggtgcgttgcagcggtgagagtttttgcgcgccggtaatccacgcgttcccgagggctacgacgtggtcgatttggactgttgtcgaggtgtgccggccgcgccgccaggcgagtgtggacccggtgtaggggtcgtggagtcgcccggagacgaccacgcatcgtgatccgggtttcaggtgggcctcgaccaggtcgcgggcaagggcatcgttgcgggtgtcgcatccgttgtggccccaggggcgggtcaa

SEQ ID NO: 126 - DNA, 599 bp, Propionibacterium acnes; identical to SEQ ID NO: 100

SEQ ID NO: 127 - DNA, 3076 bp, Propionibacterium acnes
gtgttccagtgcctcgcgggcgtgatgttcttcttcggcaccttcttgccacatgcttcgcgcttcagcctcgccatccaagcgaacctggactgtgaacgagtcctcatcgggtccgtcctcattccacgcggcaatgatcccacgggcctcgtctgcgacctgactcaacttcatcgcctgcccgacagccccgagagccggaatctcgaacacccagatattcgcctcagccgagacctcacgatgggcgatcacttcgtaggtcgtctcaccttctactgtcgtgtccattacttccactccttcggaattttcacgcctgctcgctccagctgtgccaggacaccaactgacgtcagctggtgtcctgctggtatcgatacgcgcccggctccgccggggcgtccccagatttcatggcttcccttggcgttccgcagacgggcccatccttgagaacggagcagcttgaggacgtccttagttttctgcggtttcacacatcatagtatagccccacttaacttgtaaactaagcccctgtttacattttagttggtgcatgtgatccctgctcttatgacgtcgcccgacctggcgccttagacatgcactgttcatcctcaaccacactcaccgtcacgggtccgaaggcgaggtctatcaccattcgcatcgatgaagttgaagcaggatcgtccgcatcacgcactgccgatccggacagacgccaccggccgtaccgactgtttacgatctgccaccgcagactgctgccataaccgctatcacctctgatagtacgtttagtactatcagaggtgattcaagattctcctgtcgagcagccctacagtcacgaagtcctgcgatcgtcatcgcttaaggcagacggatggccatcggggaccactcgcaaagcaggggcgatcagcaacagtgatgtgccatgagcaagtactggtgcaccggctgtttactccgcccctagataaaccacgggtgcaggggtggacaccacaccatgaccgatgtggtgcccaccccatggctcacaggcaggccctatcgccgggagcactgctgcagatgaggctcagtaacctgccatgtctcacctggggccaaggtgccaagctccccacggaatctcaggcatcggaaaccagcagccgaacttccacagcatgagcgccctacgaaaaagcaggccgccgacggttctcaagaactcgccggcggcctgcatcgccactcgaactgtaaccgtggtccgaccccgtgcacaggtaagctccacactcccaccaggcatggccgaggcagtaccaagttgccgtggcccatcggcagatttggttaaattttgaaaagtcatatagactccttctgtaaatttttaaatctcataggactctcgccatcgccagccagcttcgacaggagtcccgatgtttcaccgagtgaaatatcggcaccgtttgagttgacctaaagctcaaaagatgctagaatccatcttacctcgttaggggcgttttgtcaaacgcccctatattgcgtgtcttcgcgcgtcgtagcgctgatgctgcgcctgtgtcgactatccgtttgtaagtactttcgatgacaccagcagtggctactcatgactggtgcgtgcgggtctaaagcagcagggaaaggaatcgcagtagaagccgcttgattcctatcacccctgatggtactatcagtactaacagagcagggcttactcgatgcgtgagaatcggggacatgctgagcctctcgtaggtcattggcctgctgggcgtcagtgtggcgcggttcgatccagtgaactctatcagctctgttagtactgtcagagttgatatattcgaccccaggaggagcccatgagttacatcgttcgcaccggaaatttggtcgacacccccgagctgcgtgagggagagcatggcccgtacacctacgctcgcgtcatcgtgtccgatcgcattcgccaggaggacggcagctacgtcaacgggccagcgatcgcctacgacgtcttggcgggtggcagccaagccgtgaatctggttgaagccgccaaggcgagcggcaacatccgcatcatgttcgcgggccgttaccgcgtcaccgagtggcggggtgagcagggcactcgtatccagcatgaggtccgagccgacgaagtgagcgtgagcctgctcggtcagagggtgaccgtggagcggcctcgaggtgacgtggcatccaaggagagcacgtcgttctgattgagtccgggggcacggtggtcgccgtggtaaaccgtgcccctgacagtactattgacactattggaggtatcagtgtgactgctcaaattttcgccttgtgcaaccagaagggtggcgtcggaaagtcgacatcgacgtttcatctggcccgtgccgcggtgttgcgtggccagcgtgtgcttgtcgtcgacaacgacccccagggcaacctgacgtctgtcgcggccgccgagcccgtgggggaggatcaggcggggctggccgatgtgctcagcgcgcgtgctccagagaccctccgcgatgtgatcgtgccgggaatctggtctggcctcgatgtcgtgccgacgtctggcatcacgctcggctgggtgcgtgacgaactcgtgatcgccggtgccggccgagaaggccggctgcgggaggccctggccggcgtcgaggacgactacgacgtgatcctgatcgactgtgctccatcgctcgatcagctcacgatcaacggcctggtggccgcccagggtgtcatcgtcgtgacgcactcgaagttgtggagcgccaacggcctcgcccagctgctcgacaccatcgacagcgtgcgcagctactacaacggcgcgctgcgcgtggcgggcatcatcgtcaaccagcacgaggagaacaccatcagcgggaaaacctggctcgacgagctgcatcaggctgccgagtcccggaagctgaccgtgcttgacccgccgatccccaagcgtgtcgtcatcgccgataccgtcgaggccgcgcgc

SEQ ID NO: 128 - DNA, 2557 bp, Propionibacterium acnes
aaacctctaccaagcatacgctggcaagcccccctctcggccccaccacaacatcaattgctgactcgaacacctttgaggcagcgctttcggcttgcgcaaccccacccacgacaccgtccgcttactactcgaagctgagggattcagaccccacctacaccctcgattgtgaagagcctccaaagcccgatacaacgtctggcgagacaccgtgaacgacctcgccaccgcagcaacgcaccagcagcgcgggatggcttggtattagcccagcgcagggcccccaggcaccagccctaacgaccccgcacccgacgtggctagaggataagccgcacgggaggactccatacccgccgactcattccagcccgccaccagccgagccatatgatcaaccgcccgcggtaaataatccagccactcacgccggtcgtacaaggaaccggccccgctccaggcgtgtgcccaggatcgccacaacacgtcgagctcgaccaccacgcccggaatagattcccactccaaatccggatcagcggccgccacgtaccagatcggccacatccgtcttggcccatctccagcccgccagacccagggaggccatcacctcatcgacgccgcgccgggtggtctcatcaaccccgtcaaacagctcgggccacctcgatgatgccgtccgtgaacgatccagattcatgacatgctcctcttcacagatgccgacgacgatcaggccgtggccgtggcaacggggtgacctgccggcgcggctcacgacgttgagccggaaccacacgagacgcaccagtgtgctgcgccgtcttgagtcgggcgctgtactgggccctggcgctgtggtgaacagcccgacgaagcaccgaccgccggctgtcctcatcgccagggcgaggcatggggcgcggcatggtgcgcccggtagcagcatccatgagggtgatccggtcagccaaaatgccgagccggttttcccacttccggggccacggcaccagcaggtcacgctgacagcccacgccgtggcgtcggcagtccacaacattttctcacggccaggatgcgagtgcagcagctccaccggaacaccagcatcacgcacccgccgcatcgtgacctcatcctcacgctgccgatcaccgtcaaccagatggtcagccacgatggtgttcacaccccatgactcatgcagttgcctggccaaggcgcccaacacctgctgacgcacctgtgacttgacgtcatcatcctccagatcctgtgtaccaaccatcacggaggccaacacatcactgcgttgctgaaccagggtgttgacgacgtcgacatcgtcgatacccatgggattgttggcgcgcgcggccacggcatgaaacgtgttggactgcaaattctcgaccagaccacgccgatagtcgttgaactgggaggtgtcggcaatgacaccggtcatgatgtaggccgacccctcggacaaggccctgtaggactcgtcgacgaacgccaccaaccccggccgccgccggtaaagtcgacctgcttcctcgtcagccagcaaccatgacagtttttgccccatatgtcctccttgctgacatgacctcgaacatggtaaactttccgtaggaaaaacggggcaagtactttcgagcggctacctcggcccccggtgggctgtccagccttgtgcggaccgaagccgggggattccttatgtttgcggcaatgatgccgctgcaccccctcatgccgtggtgtggtcctttccccgtgtgcggtgtggtgcgtcgttgactggtttgtggccccgagccttactctgaccggtaggagaacggtgtggggtctacggatagcccactcggctcccggtggaatgtccaacagggtagggttgatgagttggtccatcaggaccgtcccggtggctgcgtcaatgatcgatatttcgatgatgcgcccgtccaggtcggtggtttcggtgtcgaggatgactccgactccgggttctaggagttggggatccaatgggtggtcatcgtgtggctcctacagggagtgtctgggctggacagcggtgcaatacccgcgccatagcggttttttctgcgggggtgacccacagctggtatttcgttttgacggcgatttggcgggccacgtagtcgcatctgtaggccttgttagggggtagccaggtcgctgcatccctgtctcgtttggcctcattagcgggtccgtcgacagccagcaagttcaacgggtcgttggccagggcggtgcgttgcagcggtgagagtttttgcgcgccggtaatccacgcgttcccgagggctacgacgtggtcgatttggactgttgtcgaggtgtgccggccgcgccgccaggcgagtgtggacccggtgtaggggtcgtggagtcgcccggagacgaccacgcatcgtgatccgggtttcaggtgggcctcgaccaggtcgcgggcaagggcatcgttgcgggtgtcgcatccgttgtggccccaggggcgggtcaa

SEQ ID NO: 129 - DNA, 599 bp, Propionibacterium acnes; identical to SEQ ID NO: 100

SEQ ID NO: 130 - DNA, 1871 bp, Propionibacterium acnes
gccgacggttctcaagaactcgccggcggcctgcatcgccactcgaactgtaaccgtggtccgaccccgtgcacaggtaagctccacactcccaccaggcatggccgaggcagtaccaagttgccgtggcccatcggcagatttggttaaattttgaaaagtcatatagactccttctgtaaatttttaaatctcataggactctcgccatcgccagccagcttcgacaggagtcccgatgtttcaccgagtgaaatatcggcaccgtttgagttgacctaaagctcaaaagatgctagaatccatcttacctcgttaggggcgttttgtcaaacgcccctatattgcgtgtcttcgcgcgtcgtagcgctgatgctgcgcctgtgtcgactatccgtttgtaagtactttcgatgacaccagcagtggctactcatgactggtgcgtgcgggtctaaagcagcagggaaaggaatcgcagtagaagccgcttgattcctatcacccctgatggtactatcagtactaacagagcagggcttactcgatgcgtgagaatcggggacatgctgagcctctcgtaggtcattggcctgctgggcgtcagtgtggcgcggttcgatccagtgaactctatcagctctgttagtactgtcagagttgatatattcgaccccaggaggagcccatgagttacatcgttcgcaccggaaatttggtcgacacccccgagctgcgtgagggagagcatggcccgtacacctacgctcgcgtcatcgtgtccgatcgcattcgccaggaggacggcagctacgtcaacgggccagcgatcgcctacgacgtcttggcgggtggcagccaagccgtgaatctggttgaagccgccaaggcgagcggcaacatccgcatcatgttcgcgggccgttaccgcgtcaccgagtggcggggggagcagggcactcgtatccagcatgaggtccgagccgacgaagtgagcgtgagcctgctcggtcagagggtgaccgtggagcggcctcgaggtgacgtggcatccaaggagagcacgtcgttctgattgagtccgggggcacggtggtcgccgtggtaaaccgtgcccctgacagtactattgacactattggaggtatcagtgtgactgctcaaattttcgccttgtgcaaccagaagggtggcgtcggaaagtcgacatcgacgtttcatctggcccgtgccgcggtgttgcgtggccagcgtgtgcttgtcgtcgacaacgacccccagggcaacctgacgtctgtcgcggccgccgagcccgtgggggaggatcaggcggggctggccgatgtgctcagcgcgcgtgctccagagaccctccgcgatgtgatcgtgccgggaatctggtctggcctcgatgtcgtgccgacgtctggcatcacgctcggctgggtgcgtgacgaactcgtgatcgccggtgccggccgagaaggccggctgcgggaggccctggccggcgtcgaggacgactacgacgtgatcctgatcgactgtgctccatcgctcgatcagctcacgatcaacggcctggtggccgcccagggtgtcatcgtcgtgacgcactcgaagttgtggagcgccaacggcctcgcccagctgctcgacaccatcgacagcgtgcgcagctactacaacggcgcgctgcgcgtggcgggcatcatcgtcaaccagcacgaggagaacaccatcagcgggaaaacctggctcgacgagctgcatcaggctgccgagtcccggaagctgaccgtgcttgacccgccgatccccaagcgtgtcgtcatcgccgataccgtcgaggccgcgcgcggtctcgacga

SEQ ID NO: 131 - DNA, 1729 bp, Propionibacterium acnes
cacgcacccgccgcatcgtgacctcatcctcacgtgccaccagcgggggagagcgactaccgctgcagccggtccaaagcgactcttcacagatgagggggtggatcggtagctgacccctaggtcctgatgtgggtcgaggtccttggaatgatggaagttcctacacacccatcgccaaagacctcaacatggacaacgctaccttcaccactccctcatccgtgaagagccagtttatgcacggtgttgaaagaggcgtcggtctacgacgaatgcgggttaatggtcttgcggtgtggggcgctgggcgatggcatcgagaacgcgtgagtgggtggcgatccattcggccgcgtcggggttgatgttgcgggcgacggtgtcgatcgctgttacgtagtgggcaagcctgcgaatctcagcttgttggtcagggtgatcgctgatgagaggctcttgatgggaggcgcggttacggacgtggcggatgagctccacgttttcctcgaagtcgcgtcggctacgccccgggtagtgaggcatacctccgttacgtaagtcagtgagagctttccatacggttgcttccaggcgcggggtgagcagaaagcgccagttgtccagtgacagactcgccacgatctgatcaggggtcgcatcgagcctcgcgcgccgcagtcgcttctcggccctggcgacgttacgcgggaaaccaccgagccgatagctcggggattcccaccaacgccgtatgccagtatcggcgctcaggcgcacgtcaatgaagtttctcaggagtacctcgacatggctgatgtcttccaagaacgctttcgagatgcgggtgttccacacgtaccacgcatcgactggttcgatccggtagcggctgagcctggcgggtgagaaccactcctgcaacgtctcacgactcaccgtgggagcgtggtaggattgatgacgataggcctcgggaaggtcaatgccgcgaaatatcggtatacccccgaggccattgtcttgcccaggcccctcctcgcatacttgcggggcgtcattggctgccgtcatctcgtctcttcccggtacgtggctgtccatgttcacgggcaggtacggcaatgaggttcccgcacacaaacctctaccaagcatacgctggcaagcccccctctcggccccaccacaacatcaattgctgactcgaacacctttgaggcagcgctttcggcttgcgcaaccccacccacgacaccgtccgcttactactcgaagctgagggattcagaccccacctacaccctcgattgtgaagagcctccaaagcccgatacaacgtctggcgagacaccgtgaacgacctcgccaccgcagcaacgcaccagcagcgcgggatggcttggtattagcccagcgcagggcccccaggcaccagccctaacgaccccgcacccgacgtggctagaggataagccgcacgggaggactccatacccgccgactcattccagcccgccaccagccgagccatatgatcaaccgcccgcggtaaataatccagccactcacgccggtcgtacaaggaaccggccccgctccaggcgtgtgcccaggatcgccacaacacgtcgagctcgaccaccacgcccggaatagattcccactccaaatccggatcagcggccgccacgtaccagatcggccacatccgtcttggcccatctcc

SEQ ID NO: 132 - DNA, 1729 bp, Propionibacterium acnes; identical to SEQ ID NO: 131

SEQ ID NO: 133 - DNA, 1725 bp, Propionibacterium acnes
cgcacccgccgcatcgtgacctcatcctcacgtgccaccagcgggggagagcgactaccgctgcagccggtccaaagcgactcttcacagatgagggggtggatcggtagctgacccctaggtcctgatgtgggtcgaggtccttggaatgatggaagttcctacacacccatcgccaaagacctcaacatggacaacgctaccttcaccactccctcatccgtgaagagccagtttatgcacggtgttgaaagaggcgtcggtctacgacgaatgcgggttaatggtcttgcggtgtggggcgctgggcgatggcatcgagaacgcgtgagtgggtggcgatccattcggccgcgtcggggttgatgttgcgggcgacggtgtcgatcgctgttacgtagtgggcaagcctgcgaatctcagcttgttggtcagggtgatcgctgatgagaggctcttgatgggaggcgcggttacggacgtggcggatgagctccacgttttcctcgaagtcgcgtcggctacgccccgggtagtgaggcatacctccgttacgtaagtcagtgagagctttccatacggttgcttccaggcgcggggtgagcagaaagcgccagttgtccagtgacagactcgccacgatctgatcaggggtcgcatcgagcctcgcgcgccgcagtcgcttctcggccctggcgacgttacgcgggaaaccaccgagccgatagctcggggattcccaccaacgccgtatgccagtatcggcgctcaggcgcacgtcaatgaagtttctcaggagtacctcgacatggctgatgtcttccaagaacgctttcgagatgcgggtgttccacacgtaccacgcatcgactggttcgatccggtagcggctgagcctggcgggtgagaaccactcctgcaacgtctcacgactcaccgtgggagcgtggtaggattgatgacgataggcctcgggaaggtcaatgccgcgaaatatcggtatacccccgaggccattgtcttgcccaggcccctcctcgcatacttgcggggcgtcattggctgccgtcatctcgtctcttcccggtacgtggctgtccatgttcacgggcaggtacggcaatgaggttcccgcacacaaacctctaccaagcatacgctggcaagcccccctctcggccccaccacaacatcaattgctgactcgaacacctttgaggcagcgctttcggcttgcgcaaccccacccacgacaccgtccgcttactactcgaagctgagggattcagaccccacctacaccctcgattgtgaagagcctccaaagcccgatacaacgtctggcgagacaccgtgaacgacctcgccaccgcagcaacgcaccagcagcgcgggatggcttggtattagcccagcgcagggcccccaggcaccagccctaacgaccccgcacccgacgtggctagaggataagccgcacgggaggactccatacccgccgactcattccagcccgccaccagccgagccatatgatcaaccgcccgcggtaaataatccagccactcacgccggtcgtacaaggaaccggccccgctccaggcgtgtgcccaggatcgccacaacacgtcgagctcgaccaccacgcccggaatagattcccactccaaatccggatcagcggccgccacgtaccagatcggccacatccgtcttggcccatct

SEQ ID NO: 134 - DNA, 1719 bp, Propionibacterium acnes
cccgccgcatcgtgacctcatcctcacgtgccaccagcgggggagagcgactaccgctgcagccggtccaaagcgactcttcacagatgagggggtggatcggtagctgacccctaggtcctgatgtgggtcgaggtccttggaatgatggaagttcctacacacccatcgccaaagacctcaacatggacaacgctaccttcaccactccctcatccgtgaagagccagtttatgcacggtgttgaaagaggcgtcggtctacgacgaatgcgggttaatggtcttgcggtgtggggcgctgggcgatggcatcgagaacgcgtgagtgggtggcgatccattcggccgcgtcggggttgatgttgcgggcgacggtgtcgatcgctgttacgtagtgggcaagcctgcgaatctcagcttgttggtcagggtgatcgctgatgagaggctcttgatgggaggcgcggttacggacgtggcggatgagctccacgttttcctcgaagtcgcgtcggctacgccccgggtagtgaggcatacctccgttacgtaagtcagtgagagctttccatacggttgcttccaggcgcggggtgagcagaaagcgccagttgtccagtgacagactcgccacgatctgatcaggggtcgcatcgagcctcgcgcgccgcagtcgcttctcggccctggcgacgttacgcgggaaaccaccgagccgatagctcggggattcccaccaacgccgtatgccagtatcggcgctcaggcgcacgtcaatgaagtttctcaggagtacctcgacatggctgatgtcttccaagaacgctttcgagatgcgggtgttccacacgtaccacgcatcgactggttcgatccggtagcggctgagcctggcgggtgagaaccactcctgcaacgtctcacgactcaccgtgggagcgtggtaggattgatgacgataggcctcgggaaggtcaatgccgcgaaatatcggtatacccccgaggccattgttttgcccaggcccctcctcgcatacttgcggggcgtcattggctgccgtcatctcgtctcttcccggtacgtggctgtccatgttcacgggcaggtacggcaatgaggttcccgcacacaaacctctaccaagcatacgctggcaagcccccctctcggccccaccacaacatcaattgctgactcgaacacctttgaggcagcgctttcggcttgcgcaaccccacccacgacaccgtccgcttactactcgaagctgagggattcagaccccacctacaccctcgattgtgaagagcctccaaagcccgatacaacgtctggcgagacaccgtgaacgacctcgccaccgcagcaacgcaccagcagcgcgggatggcttggtattagcccagcgcagggcccccaggcaccagccctaacgaccccgcacccgacgtggctagaggataagccgcacgggaggactccatacccgccgactcattccagcccgccaccagccgagccatatgatcaaccgcccgcggtaaataatccagccactcacgccggtcgtacaaggaaccggccccgctccaggcgtgtgcccaggatcgccacaacacgtcgagctcgaccaccacgcccggaatagattcccactccaaatccggatcagcggccgccacgtaccagatcggccacatccgtcttggcccat

SEQ ID NO: 135 - DNA, 1656 bp, Propionibacterium acnes
accagcgggggagagcgactaccgctgcagccggtccaaagcgactcttcacagatgagggggtggatcggtagctgacccctaggtcctgatgtgggtcgaggtccttggaatgatggaagttcctacacacccatcgccaaagacctcaacatggacaacgctaccttcaccactccctcatctgtgaagagccagtttatgcacggtgttgaaagaggcgtcggtctacgacgaatgcgggttaatggtcttgcggtgtggggcgctgggcgatggcatcgagaacgcgtgagtgggtggcgatccattcggccgcgtcggggttgatgttgcgggcgacggtgtcgatcgctgttacgtagtgggcaagcctgcgaatctcagcttgttggtcagggtgagcgctgatgaggggctcttgatgggaggcgcggttacggacgtggcggatgagctccacgttttcctcgaagtcgcgtcggctacgccccgggtagtgaggcatacctccgttacgtaagtcagtgagagctttccatacggttgcttccaggcgcggggtgagcagaaagcgccagttgtccagtgacagactcgccacgatctgatcaggggtcgcatcgagcctcgcgcgccgcagtcgcttctcggccctgtcgacgttacgcgggaaaccaccgagccgatagctcggggattcccaccaacgccgtatgccagtatcggcgctcaggcgcacgtcaatgaagtttctcaggagtacctcgacatggctgatgtcttccaagaacgctttcgagatgcgggtgttccacacgtaccacgcatcgactggttcgatccggtagcggctgagcctggcgggtgagaaccactcctgcaacgtctcacgactcaccgtgggagcgtggtaggattgatgacgataggcctcgggaaggtcaatgccgcgaaatatcggtatacccccgaggccattgttttgcccaggcccctcctcgcatacttgcggggcgtcattggctgccgtcatctcgtctcttcccggtacgtggctgtccatgttcacgggcaggtacggcaatgaggttcccgcacacaaacctctaccaagcatacgctggcaagcccccctctcggccccaccacaacatcaattgctgactcgaacacctttgaggcagcgctttcggcttgcgcaaccccatccacgacaccgtccgcttactactcgaagctgagggattcagaccccacctacaccctcgattgtgaagagcctccaaagcccgatacaacgtctggcgagacaccgtgaacgacctcgccaccgcagcaacgcaccagcagcgcgggatggcttggtattagcccagcgcagggccccaggcaccagccctaacgaccccgcacccgacgtggctagaggataagccgcacgggaggactccatacccgccgactcattccagcccgccaccagccgagccatatgatcaaccgcccgcggtaaataatccagccactcacgccggtcgtataaggaaccggccccgctccaggcgtgtgcccaggatcgccacaacacgtcgagctcgaccaccacgcccggaatagattcccactccaaatccggatcagcggccgccacgt

SEQ ID NO: 136 - DNA, 1438 bp, Propionibacterium acnes
cacgcacccgccgcatcgtgacctcatcctcacgctgccgatcaccgtcaaccagatggtcagccacgatggtgttcacaccccatgactcatgcagttgcctggccaaggcgcccaacacctgctgacgcacctgtgacttgacgtcatcatcctccagatcctgtgtaccaaccatcacggaggccaacacatcactgcgttgctgaaccagggtgttgacgacgtcgacatcgtcgatacccatgggattgttggcgcgcgcggccacggcatgaaacgtgttggactgcaaattctcgaccagaccacgccgatagtcgttgaactgggaggtgtcggcaatgacaccggtcatgatgtaggccgacccctcggacaaggccctgtaggactcgtcgacgaacgccaccaaccccggccgccgccggtaaagtcgacctgcttcctcgtcagccagcaaccatgacagtttttgccccatatgtcctccttgctgacatgacctcgaacatggtaaactttccgtaggaaaaacggggcaagtactttcgagcggctacctcggcccccggtgggctgtccagccttgtgcggaccgaagccgggggattccttatgtttgcggcaatgatgccgctgcaccccctcatgccgtggtgtggtcctttccccgtgtgcggtgtggtgcgtcgttgactggtttgtggccccgagccttactctgaccggtaggagaacggtgtggggtctacggatagcccactcggctcccggtggaatgtccaacagggtagggttgatgagttggtccatcaggaccgtcccggtggctgcgtcaatgatcgatatttcgatgatgcgcccgtccaggtcggtggtttcggtgtcgaggatgactccgactccgggttctaggagttggggatccaatgggtggtcatcgtgtggctcctacagggagtgtctgggctggacagcggtgcaatacccgcgccatagcggttttttctgcgggggtgacccacagctggtatttcgttttgacggcgatttggcgggccacgtagtcgcatctgtaggccttgttagggggtagccaggtcgctgcatccctgtctcgtttggcctcattagcgggtccgtcgacagccagcaagttcaacgggtcgttggccagggcggtgcgttgcagcggtgagagtttttgcgcgccggtaatccacgcgttcccgagggctacgacgtggtcgatttggactgttgtcgaggtgtgccggccgcgccgccaggcgagtgtggacccggtgtaggggtcgtggagtcgcccggagacgaccacgcatcgtgatccgggtttcaggtgggcctcgaccaggtcgcgggcaagggcatcgttgcgggtgtcgcatccgttgtggccccaggggcgggtcaa

SEQ ID NO: 137 - DNA, 1436 bp, Propionibacterium acnes
cgcacccgccgcatcgtgacctcatcctcacgctgccgatcaccgtcaaccagatggtcagccacgatggtgttcacaccccatgactcatgcagttgcctggccaaggcgcccaacacctgctgacgcacctgtgacttgacgtcatcatcctccagatcctgtgtaccaaccatcacggaggccaacacatcactgcgttgctgaaccagggtgttgacgacgtcgacatcgtcgatacccatgggattgttggcgcgcgcggccacggcatgaaacgtgttggactgcaaattctcgaccagaccacgccgatagtcgttgaactgggaggtgtcggcaatgacaccggtcatgatgtaggccgacccctcggacaaggccctgtaggactcgtcgacgaacgccaccaaccccggccgccgccggtaaagtcgacctgcttcctcgtcagccagcaaccatgacagtttttgccccatatgtcctccttgctgacatgacctcgaacatggtaaactttccgtaggaaaaacggggcaagtactttcgagcggctacctcggcccccggtgggctgtccagccttgtgcggaccgaagccgggggattccttatgtttgcggcaatgatgccgctgcaccccctcatgccgtggtgtggtcctttccccgtgtgcggtgtggtgcgtcgttgactggtttgtggccccgagccttactctgaccggtaggagaacggtgtggggtctacggatagcccactcggctcccggtggaatgtccaacagggtagggttgatgagttggtccatcaggaccgtcccggtggctgcgtcaatgatcgatatttcgatgatgcgcccgtccaggtcggtggtttcggtgtcgaggatgactccgactccgggttctaggagttggggatccaatgggtggtcatcgtgtggctcctacagggagtgtctgggctggacagcggtgcaatacccgcgccatagcggttttttctgcgggggtgacccacagctggtatttcgttttgacggcgatttggcgggccacgtagtcgcatctgtaggccttgttagggggtagccaggtcgctgcatccctgtctcgtttggcctcattagcgggtccgtcgacagccagcaagttcaacgggtcgttggccagggcggtgcgttgcagcggtgagagtttttgcgcgccggtaatccacgcgttcccgagggctacgacgtggtcgatttggactgttgtcgaggtgtgccggccgcgccgccaggcgagtgtggacccggtgtaggggtcgtggagtcgcccggagacgaccacgcatcgtgatccgggtttcaggtgggcctcgaccaggtcgcgggcaagggcatcgttgcgggtgtcgcatccgttgtggccccaggggcgggtcaa

SEQ ID NO: 138 - DNA, 1436 bp, Propionibacterium acnes; identical to SEQ ID NO: 137

SEQ ID NO: 139 - DNA, 1432 bp, Propionibacterium acnes
cccgccgcatcgtgacctcatcctcacgctgccgatcaccgtcaaccagatggtcagccacgatggtgttcacaccccatgactcatgcagttgcctggccaaggcgcccaacacctgctgacgcacctgtgacttgacgtcatcatcctccagatcctgtgtaccaaccatcacggaggccaacacatcactgcgttgctgaaccagggtgttgacgacgtcgacatcgtcgatacccatgggattgttggcgcgcgcggccacggcatgaaacgtgttggactgcaaattctcgaccagaccacgccgatagtcgttgaactgggaggtgtcggcaatgacaccggtcatgatgtaggccgacccctcggacaaggccctgtaggactcgtcgacgaacgccaccaaccccggccgccgccggtaaagtcgacctgcttcctcgtcagccagcaaccatgacagtttttgccccatatgtcctccttgctgacatgacctcgaacatggtaaactttccgtaggaaaaacggggcaagtactttcgagcggctacctcggcccccggtgggctgtccagccttgtgcggaccgaagccgggggattccttatgtttgcggcaatgatgccgctgcaccccctcatgccgtggtgtggtcctttccccgtgtgcggtgtggtgcgtcgttgactggtttgtggccccgagccttactctgaccggtaggagaacggtgtggggtctacggatagcccactcggctcccggtggaatgtccaacagggtagggttgatgagttggtccatcaggaccgtcccggtggctgcgtcaatgatcgatatttcgatgatgcgcccgtccaggtcggtggtttcggtgtcgaggatgactccgactccgggttctaggagttggggatccaatgggtggtcatcgtgtggctcctacagggagtgtctgggctggacagcggtgcaatacccgcgccatagcggttttttctgcgggggtgacccacagctggtatttcgttttgacggcgatttggcgggccacgtagtcgcatctgtaggccttgttagggggtagccaggtcgctgcatccctgtctcgtttggcctcattagcgggtccgtcgacagccagcaagttcaacgggtcgttggccagggcggtgcgttgcagcggtgagagtttttgcgcgccggtaatccacgcgttcccgagggctacgacgtggtcgatttggactgttgtcgaggtgtgccggccgcgccgccaggcgagtgtggacccggtgtaggggtcgtggagtcgcccggagacgaccacgcatcgtgatccgggtttcaggtgggcctcgaccaggtcgcgggcaagggcatcgttgcgggtgtcgcatccgttgtggccccaggggcgggtcaa

SEQ ID NO: 140 - DNA, 1432 bp, Propionibacterium acnes
cccgccgcatcgtgacctcatcctcacgctgccgatcaccgtcaaccagatggtcagccacgatggtgttcacaccccatgactcatgcagttgcctggccaaggcgcccaacacctgctgacgcacctgtgacttgacgtcatcatcctccagatcctgtgtaccaaccatcacggaggccaacacatcactgcgttgctgaaccagggtgttgacgacgtcgacatcgtcgatatccatgggattgttggcgcgcgcggccacggcatgaaacgtgttggactgcaaattctcgaccagaccacgccgatagtcgttgaactgggaggtgtcggcaatgacaccggtcatgatgtaggccgacccctcggacaaggccctgtaggactcgtcgacgaacgccaccaaccccggccgccgccggtaaagtcgacctgcttcctcgtcagccagcaaccatgacagtttttgccccatatgtcctccttgctgacatgacctcgaacatggtaaactttccgtaggaaaaacggggcaagtactttcgagcggctacctcggcccccggtgggctgtccagccttgtgcggaccgaagccgggggattccttatgtttgcggcaatgatgccgctgcaccccctcatgccgtggtgtggtcctttccccgtgtgcggtgtggtgcgtcgttgactggtttgtggccccgagccttactctgaccggtaggagaacggtgtggggtctacggatagcccactcggctcccggtggaatgtccaacagggtagggttgatgagttggtccatcaggaccgtcccggtggctgcgtcaatgatcgatatttcgatgatgcgcccgtccaggtcggtggtttcggtgtcgaggatgactccgactccgggttctaggagttggggatccaatgggtggtcatcgtgtggctcctacagggagtgtctgggctggacagcggtgcaatacccgcgccatagcggttttttctgcgggggtgacccacagctggtatttcgttttgacggcgatttggcgggccacgtagtcgcatctgtaggccttgttagggggtagccaggtcgctgcatccctgtctcgtttggcctcattagcgggtccgtcgacagccagcaagttcaacgggtcgttggccagggcggtgcgttgcagcggtgagagtttttgcgcgccggtaatccacgcgttcccgagggctacgacgtggtcgatttggactgttgtcgaggtgtgccggccgcgccgccaggcgagtgtggacccggtgtaggggtcgtggagtcgcccggagacgaccacgcatcgtgatccgggtttcgggtgggcctcgaccaggtcgcgggcaagggcatcgttgcgggtgtcgcatccgttgtggccccaggggcgggtcaa

SEQ ID NO: 141 - DNA, 1438 bp, Propionibacterium acnes
cacgcacccgccgcatcgtgacctcatcctcacgctgccgatcaccgtcaaccagatggtcagccacgatggtgttcacaccccatgactcatgcagttgcctggccaaggcgcccaacacctgctgacgcacctgtgacttgacgtcatcatcctccagatcctgtgtaccaaccatcacggaggccaacacatcactgcgttgctgaaccagggtgttgacgacgtcgacatcgtcgatacccatgggattgttggcgcgcgcggccacggcatgaaacgtgttggactgcaaattctcgaccagaccacgccgatagtcgttgaactgggaggtgtcggcaatgacaccggtcatgatgtaggccgacccctcggacaaggccctgtaggactcgtcgacgaacgccaccaaccccggccgccgccggtaaagtcgacctgcttcctcgtcagccagcaaccatgacagtttttgccccatatgtcctccttgctgacatgacctcgaacatggtaaactttccgtaggaaaaacggggcaagtactttcgagcggctacctcggcccccggtgggctgtccagccttgtgcggaccgaagccgggggattccttatgtttgcggcaatgatgccgcttcattttttcttgccgtggtgtggtcctttccccgtgtgcggtgtggtgcgtcgttgactggtttgtggccccgagccttactctgaccggtaggagaacggtgtggggtctacggatagcccactcggctcccggtggaatgtccaacagggtagggttgatgagttggtccatcaggaccgtcccggtggctgcgtcaatgatcgatatttcgatgatgcgcccgtccaggtcggtggtttcggtgtcgaggatgactccgactccgggttctaggagttggggatccaatgggtggtcatcgtgtggctcctacagggagtgtctgggctggacagcggtgcaatacccgcgccatagcggttttttctgcgggggtgacccacagctggtatttcgttttgacggcgatttggcgggccacgtagtcgcatctgtaggccttgttagggggtagccaggtcgctgcatccctgtctcgtttggcctcattagcgggtccgtcgacagccagcaagttcaacgggtcgttggccagggcggtgcgttgcagcggtgagagtttttgcgcgccggtaatccacgcgttcccgagggctacgacgtggtcgatttggactgttgtcgaggtgtgccggccgcgccgccaggcgagtgtggacccggtgtaggggtcgtggagtcgcccggagacgaccacgcatcgtgatccgggtttcaggtgggcctcgaccaggtcgcgggcaagggcatcgttgcgggtgtcgcatccgttgtggccccaggggcgggtcaa

SEQ ID NO: 142 - DNA, 1399 bp, Propionibacterium acnes
gatcaccgtcaaccagatggtcagccacgatggtgttcacaccccatgactcatgcagttgcctggccaaggcgcccaacacctgctgacgcacctgtgacttgacgtcatcatcctccagatcctgtgtaccaaccatcacggaggccaacacatcactgcgttgctgaaccagggtgttgacgacgtcgacatcgtcgatacccatgggattgttggcgcgcgcggccacggcatgaaacgtgttggactgcaaattctcgaccagaccacgccgatagtcgttgaactgggaggtgtcggcaatgacaccggtcatgatgtaggccgacccctcggacaaggccctgtaggactcgtcgacgaacgccaccaaccccggccgccgccggtaaagtcgacctgcttcctcgtcagccagcaaccatgacagtttttgccccatatgtcctccttgctgacatgacctcgaacatggtaaactttccgtaggaaaaacggggcaagtactttcgagcggctacctcggcccccggtggaatgtccagccttgtgcggaccgaagccgggggattccttatgtttgcggcaatgatgccgctgcaccccctcatgccgtggtgtggtcctttccccgtgtgcggtgtggtgcgtcgttgactggtttgtggccccgagccttactctgaccggtaggagaacggtgtggggtctacggatagcccactcggctcccggtggaatgtccaacagggtagggttgatgagttggtccatcaggaccgtcccggtggctgcgtcaatgatcgatatttcgatgatgcgcccgtccaggtcggtggtttcggtgtcgaggatgactccgactccgggttctaggagttggggatccaatgggtggtcatcgtgtggctcctacagggagtgtctgggctggacagcggtgcaatacccgcgccatagcggttttttctgcgggggtgacccacagctggtatttcgttttgacggcgatttggcgggccacgtagtcgcatctgtaggccttgttagggggtagccaggtcgctgcatccctgtctcgtttggcctcattagcgggtccgtcgacagccagcaagttcaacgggtcgttggccagggcggtgcgttgcagcggtgagagtttttgcgcgccggtaatccacgcgttcccgagggctacgacgtggtcgatttggactgttgtcgaggtgtgccggccgcgccgccaggcgagtgtggacccggtgtaggggtcgtggagtcgcccggagacgaccacgcatcgtgatccgggtttcaggtgggcctcgaccaggtcgcgggcaagggcatcgttgcgggtgtcgcatccgttgtggccccaggggcgggtcaa

SEQ ID NO: 143 - DNA, 1155 bp, Propionibacterium acnes
acaaacctctaccaagcatacgctggcaagcccccctctcggccccaccacaacatcaattgctgactcgaacacctttgaggcagcgctttcggcttgcgcaaccccacccacgacaccgtccgcttactactcgaagctgagggattcagaccccacctacaccctcgattgtgaagagcctccaaagcccgatacaacgtctggcgagacaccgtgaacgacctcgccaccgcagcaacgcaccagcagcgcgggatggcttggtattagcccagcgcagggcccccaggcaccagccctaacgaccccgcacccgacgtggctagaggataagccgcacgggaggactccatacccgccgactcattccagcccgccaccagccgagccatatgatcaaccgcccgcggtaaataatccagccactcacgccggtcgtacaaggaaccggccccgctccaggcgtgtgcccaggatcgccacaacacgtcgagctcgaccaccacgcccggaatagattcccactccaaatccggatcagcggccgccacgtaccagatcggccacatccgtcttggcccatctccagcccgccagacccagggaggccatcacctcatcgacgccgcgccgggtggtctcatcaaccccgtcaaacagctcgggccacctcgatgatgccgtccgtgaacgatccagattcatgacatgctcctcttcacagatgccgacgacgatcaggccgtggccgtggcaacggggtgacctgccggcgcggctcacgacgttgagccggaaccacacgagacgcaccagtgtgctgcgccgtcttgagtcgggcgctgtactgggccctggcgctgtggtgaacagcccgacgaagcaccgaccgccggctgtcctcatcgccagggcgaggcatggggcgcggcatggtgcgcccggtagcagcatccatgagggtgatccggtcagccaaaatgccgagccggttttcccacttccggggccacggcaccagcaggtcacgctgacagcccacgccgtggcgtcggcagtccacaacattttctcacggccaggatgcgagtgcagcagctccaccggaacaccagcatcacgcacccgccgcatcgtgacctcatcctcacg

SEQ ID NO: 144 - DNA, 715 bp, Propionibacterium acnes
accagatcggccacatccgtcttggcccatctccagcccgccagacccagggaggccatcacctcatcgacgccgcgccgggtggtctcatcaaccccgtcaaacagctcgggccacctcgatgatgccgtccgtgaacgatccagattcatgacatgctcctcttcacagatgccgacgacgatcaggccgtggccgtggcaacggggtgacctgccggcgcggctcacgacgttgagccggaaccacacgagacgcaccagtgtgctgcgccgtcttgagtcgggcgctgtactgggccctggcgctgtggtgaacagcccgacgaagcaccgaccgccggctgtcctcatcgccagggcgaggcatggggcgcggcatggtgcgcccggtagcagcatccatgagggtgatccggtcagccaaaatgccgagccggttttcccacttccggggccacggcaccagcaggtcacgctgacagcccacgccgtggcgtcggcagtccacaacattttctcacggccaggatgcgagtgcagcagctccaccggaacaccagcatcacgcacccgccgcatcgtgacctcatcctcacgtgccaccagcgggggagagcgactaccgctgcagccggtccaaagcgactcttcacagatgagggggtggatcggtagctgacccctaggtcctgatgtgggtcgaggtccttgga

SEQ ID NO: 145 - DNA, 1134 bp, Propionibacterium acnes
gtgttccagtgcctcgcgggcgtgatgttcttcttcggcaccttcttgccacatgcttcgcgcttcagcctcgccatccaagcgaacctggactgtgaacgagtcctcatcgggtccgtcctcattccacgcggcaatgatcccacgggcctcgtctgcgacctgactcaacttcatcgcctgcccgacagccccgagagccggaatctcgaacacccagatattcgcctcagccgagacctcacgatgggcgatcacttcgtaggtcgtctcaccttctactgtcgtgtccattacttccactccttcggaattttcacgcctgctcgctccagctgtgccaggacaccaactgacgtcagctggtgtcctgctggtatcgatacgcgcccggctccgccggggcgtccccagatttcatggcttcccttggcgttccgcagacgggcccatccttgagaacggagcagcttgaggacgtccttagttttctgcggtttcacacatcatagtatagccccacttaacttgtaaactaagcccctgtttacattttagttggtgcatgtgatccctgctcttatgacgtcgcccgacctggcgccttagacatgcactgttcatcctcaaccacactcaccgtcacgggtccgaaggcgaggtctatcaccattcgcatcgatgaagttgaagcaggatcgtccgcatcacgcactgccgatccggacagacgccaccggccgtaccgactgtttacgatctgccaccgcagactgctgccataaccgctatcacctctgatagtacgtttagtactatcagaggtgattcaagattctcctgtcgagcagccctacagtcacgaagtcctgcgatcgtcatcgcttaaggcagacggatggccatcggggaccactcgcaaagcaggggcgatcagcaacagtgatgtgccatgagcaagtactggtgcaccggctgtttactccgcccctagataaaccacgggtgcaggggtggacaccacaccatgaccgatgtggtgcccaccccatggctcacaggcaggccctatcgccgggagcactgctgcagatgaggctcagtaacctgccatgtctcacctggggccaaggt

SEQ ID NO: 146 - DNA, 1057 bp, Propionibacterium acnes
cccctaggtcctgatgtgggtcgaggtccttggaatgatggaagttcctacacacccatcgccaaagacctcaacatggacaacgctaccttcaccactccctcatctgtgaagagccagtttatgcacggtgttgaaagaggcgtcggtctacgacgaatgcgggttaatggtcttgcggtgtggggcgctgggcgatggcatcgagaacgcgtgagtgggtggcgatccattcggccgcgtcggggttgatgttgcgggcgacggtgtcgatcgctgttacgtagtgggcaagcctgcgaatctcagcttgttggtcagggtgatcgctgatgagaggctcttgatgggaggcgcggttacggacgtggcggatgagctccacgttttcctcgaagtcgcgtcggctacgccccgggtagtgaggcatacctccgttacgtaagtcagtgagagctttccatacggttgcttccaggcgcggggtgagcagaaagcgccagttgtccagtgacagactcgccacgatctgatcaggggtcgcatcgagcctcgcgcgccgcagtcgcttctcggccctggcgacgttacgcgggaaaccaccgagccgatagctcggggattcccaccaacgccgtatgccagtatcggcgctcaggcgcacgtcaatgaagtttctcaggagtacctcgacatggctgatgtcttccaagaacgctttcgagatgcgggtgttccacacgtaccacgcatcgactggttcgatccggtagcggctgagcctggcgggtgagaaccactcctgcaacgtctcacgactcaccgtgggagcgtggtaggattgatgacgataggcctcgggaaggtcaatgccgcgaaatatcggtatacccccgaggtcattgttttgcccaggcccctcctcgcatacttgcggggcgtcattggctgccgtcatctcgtctcttcccggtacgtggctgtccatgttcacgggcaggtacggcaatgaggttcccgcacacaaacctctaccaagcatacgctggcaagcccc

SEQ ID NO: 147 - DNA, 1057 bp, Propionibacterium acnes; identical to SEQ ID NO: 146

SEQ ID NO: 148 - DNA, 1057 bp, Propionibacterium acnes; identical to SEQ ID NO: 146

SEQ ID NO: 149 - DNA, 1055 bp, Propionibacterium acnes
cccctaggtcctgatgtgggtcgaggtccttggaatgatggaagttcctacacacccatcgccaaagacctcaacatggacaacgctaccttcaccactccctcatctgtgaagagccagtttatgcacggtgttgaaagaggcgtcggtctacgacgaatgcgggttaatggtcttgcggtgtggggcgctgggcgatggcatcgagaacgcgtgagtgggtggcgatccattcggccgcgtcggggttgatgttgcgggcgacggtgtcgatcgctgttacgtagtgggcaagcctgcgaatctcagcttgttggtcagggtgatcgctgatgaggggctcttgatgggaggcgcggttacggacgtggcggatgagctccacgttttcctcgaagtcgcgtcggctacgccccgggtagtgaggcatacctccgttacgtaagtcagtgagagctttccatacggttgcttccaggcgcggggtgagcagaaagcgccagttgtccagtgacagactcgccacgatctgatcaggggtcgcatcgagccccgcgcgccgcagtcgcttctcggccctggcgacgttacgcgggaaaccaccgagccgatagctcggggattcccaccaacgccgtatgccagtatcggcgctcaggcgcacgtcaatgaagtttctcaggagtacctcgacatggctgatgtcttccaagaacgctttcgagatgcgggtgttccacacgtaccacgcatcgactggttcgatccggtagcggctgagcctggcgggtgagaaccactcctgcaacgtctcacgactcaccgtgggagcgtggtaggattgatgacgataggcctcgggaaggtcaatgccgcgaaatatcggtatacccccgaggtcattgtcttgcccaggcccctcctcgcatacttgcggggcgtcattggctgccgtcatctcgtctcttcccggtacgtggctgtccatgttcacgggcaggtacggcaatgaggttcccgcacacaaacctctaccaagcatacgctggcaagcc

SEQ ID NO: 150 - DNA, 1055 bp, Propionibacterium acnes; identical to SEQ ID NO: 149

SEQ ID NO: 151 - DNA, 1055 bp, Propionibacterium acnes
cccctaggtcctgatgtgggtcgaggtccttggaatgatggaagttcctacacacccatcgccaaagacctcaacatggacaacgctaccttcaccactccctcatctgtgaagagccagtttatgcacggtgttgaaagaggcgtcggtctacgacgaatgcgggttaatggtcttgcggtgtggggcgctgggcgatggcatcgagaacgcgtgagtgggtggcgatccattcggccgcgtcggggttgatgttgcgggcgacggtgtcgatcgctgttacgtagtgggcaagcctgcgaatctcagcttgttggtcagggtgagcgctgatgaggggctcttgatgggaggcgcggttacggacgtggcggatgagctccacgttttcctcgaagtcgcgtcggctacgccccgggtagtgaggcatacctccgttacgtaagtcagtgagagctttccatacggttgcttccaggcgcggggtgagcagaaagcgccagttgtccagtgacagactcgccacgatctgatcaggggtcgcatcgagcctcgcgcgccgcagtcgcttctcggccctgtcgacgttacgcgggaaaccaccgagccgatagctcggggattcccaccaacgccgtatgccagtatcggcgctcaggcgcacgtcaatgaagtttctcaggagtacctcgacatggctgatgtcttccaagaacgctttcgagatgcgggtgttccacacgtaccacgcatcgactggttcgatccggtagcggctgagcctggcgggtgagaaccactcctgcaacgtctcacgactcaccgtgggagcgtggtaggattgatgacgataggcctcgggaaggtcaatgccgcgaaatatcggtatacccccgaggccattgttttgcccaggcccctcctcgcatacttgcggggcgtcattggctgccgtcatctcgtctcttcccggtacgtggctgtccatgttcacgggcaggtacggcaatgaggttcccgcacacaaacctctaccaagcatacgctggcaagcc

SEQ ID NO: 152 - DNA, 1055 bp, Propionibacterium acnes
cccctaggtcctgatgtgggtcgaggtccttggaatgatggaagttcctacacacccatcgccaaagacctcaacatggacaacgctaccttcaccactccctcatccgtgaagagccagtttatgcacggtgttgaaagaggcgtcggtctacgacgaatgcgggttaatggtcttgcggtgtggggcgctgggcgatggcatcgagaacgcgtgagtgggtggcgatccattcggccgcgtcggggttgatgttgcgggcgacggtgtcgatcgctgttacgtagtgggcaagcctgcgaatctcagcttgttggtcagggtgagcgctgatgaggggctcttgatgggaggcgcggttacggacgtggcggatgagctccacgttttcctcgaagtcgcgtcggctacgccccgggtagtgaggcatacctccgttacgtaagtcagtgagagctttccatacggttgcttccaggcgcggggtgagcagaaagcgccagttgtccagtgacagactcgccacgatctgatcaggggtcgcatcgagcctcgcgcgccgcagtcgcttctcggccctgtcgacgttacgcgggaaaccaccgagccgatagctcggggattcccaccaacgccgtatgccagtatcggcgctcaggcgcacgtcaatgaagtttctcaggagtacctcgacatggctgatgtcttccaagaacgctttcgagatgcgggtgttccacacgtaccacgcatcgactggttcgatccggtagcggctgagcctggcgggtgagaaccactcctgcaacgtctcacgactcaccgtgggagcgtggtaagattgatgacgataggcctcgggaaggtcaatgccgcgaaatatcggtatacccccgaggtcattgtcttgcccaggcccctcctcgcatacttgcggggcgtcattggctgccgtcatctcgtctcttcccggtacgtggctgtccatgttcacgggcaggtacggcaatgaggttcccgcacacaaacctctaccaagcatacgctggcaagcc

SEQ ID NO: 153 - DNA, 1057 bp, Propionibacterium acnes
cccctaggtcctgatgtgggtcgaggtccttggaatgatggaagttcctacacacccatcgccaaagacctcaacatggacaacgctaccttcaccactccctcatctgtgaagagccagtttatgcacggtgttgaaagaggcgtcggtctacgacgaatgcgggttaatggtcttgtggtgtggggcgctgggcgatggcatcgagaacgcgtgagtgggtggcgatccattcggccgcgtcggggttgatgttgcgggcgacggtgtcgatcgctgttacgtagtgggcaagcctgcgaatctcagcttgttggtcagggtgatcgctgatgaggggctcttgatgggaggcgcggttacggacgtggcggatgagctccacgttttcctcgaagtcgcgtcggctacgccccgggtagtgaggcatacctccgttacgtaagtcagtgagagctttccatacggttgcttccaggcgcggggtgagcagaaagcgccagttgtccagtgacagactcgccacgatctgatcaggggtcgcatcgagcctcgcgcgccgcagtcgcttctcggccctggcgacgttacgcgggaaaccaccgagccgatagctcggggattcccagcaacgccgtatgccagtatcggcgctcaggcgcacgtcaatgaagtttctcaggagtacctcgacatggctgatgtcttccaagaacgctttcgagatgcgggtgttccacacgtaccacgcatcgactggttcgatccggtagcggctgagcctggcgggtgagaaccactcctgcaacgtctcacgactcaccgtgggagcgtggtaggattgatgacgataggcctcgggaaggtcaatgccgcgaaatatcggtatacccccgaggtcattgttttgcccaggcccctcctcgcatacttgcggggcgtcattggctgccgtcatctcgtctcttcccggtacgtggctgtccatgttcacgggcaggtacggcaatgaggttcccgcacacaaacctctaccaagcatacgctggcaagcccc

SEQ ID NO: 154 - DNA, 1055 bp, Propionibacterium acnes
cccctaggtcctgatgtgggtcgaggtccttggaatgatggaagttcctacacacccatcgccaaagacctcaacatggacaacgctaccttcaccactccctcatctgtgaagagccagtttatgcacggtgttgaaagaggcgtcggtctacgacgaatgcgggttaatggtcttgtggtgtggggcgctgggcgatggcatcgagaacgcgtgagtgggtggcgatccattcggccgcgtcggggttgatgttgcgggcgacggtgtcgatcgctgttacgtagtgggcaagcctgcgaatctcagcttgttggtcagggtgagcgctgatgagaggctcttgatgggaggcgcggttacggacgtggcggatgagctccacgttttcctcgaagtcgcgtcggctacgccccgggtagtgaggcatacctccgttacgtaagtcagtgagagctttccatacggttgcttccaggcgcggggtgagcagaaagcgccagttgtccagtgacagactcgccacgatctgatcaggggtcgcatcgagcctcgcgcgccgcagtcgcttctcggccctgtcgacgttacgcgggaaaccaccgagccgatagctcggggattcccaccaacgccgtatgccagtatcggcgctcaggcgcacgtcaatgaagtttctcaggagtacctcgacatggctgatgtcttccaagaacgctttcgagatgcgggtgttccacacgtaccacgcatcgactggttcgatccggtagcggctgagcctggcgggtgagaaccactcctgcaacgtctcacgactcaccgtgggagcgtggtaagattgatgacgataggcctcgggaaggtcaatgccgcgaaatatcggtatacccccgaggtcattgtcttgcccaggcccctcctcgcatacttgcggggcgtcattggctgccgtcatctcgtctcttcccggtacgtggctgtccatgttcacgggcaggtacggcaatgaggttcccgcacacaaacctctaccaagcatacgctggcaagcc

SEQ ID NO: 155 - DNA, 1057 bp, Propionibacterium acnes
cccctaggtcctgatgtgggtcgaggtccttggaatgatggaagttcctacacacccatcgccaaagacctcaacatggacaacgctaccttcaccactccctcatctgtgaagagccagtttatgcacggtgttgaaagaggcgtcggtctacgacgaatgcgggttaatggtcttgcggtgtggggcgctgggcgatggcatcgagaacgcgtgagtgggtggcgatccattcggccgcgtcggggttgatgttgcgggcgacggtgtcgatcgctgttacgtagtgggcaagcctgcgaatctcagcttgttggtcagggtgagcgctgatgaggggctcttgatgggaggcgcggttacggacgtggcggatgagctccacgttttcctcgaagtcgcgtcggctacgccccgggtagtgaggcatacctccgttacgtaagtcagtgagagctttccatacggttgcttccaggcgcggggtgagcagaaagcgccagttgtccagtgacagactcgccacgatctgatcaggggtcgcatcgagcctcgcgcgccgcagtcgcttctcggccctgtcgacgttacgcgggaaaccaccgagccgatagctcggggattcccaccaacgccgtatgccagtatcggcgctcaggcgcacgtcaatgaagtttctcaggagtacctcgacatggctgatgtcttccaagaacgctttcgagatgcgggtgttccacacgtaccacgcatcgactggttcgatccggtagcggctgagcctggcgggtgagaaccactcctgcaacgtctcacgactcaccgtgggagcgtggtaggattgatgacgataggcctcgggaaggtcaatgccgcgaaatatcggtatacccccgaggtcattgttttgcccaggcccctcctcgcatacttgcggggcgtcattggctggcgtcatctcgtctcttcccggtacgtggctgtccatgttcacgggcaggtacggcaatgaggttcccgcacacaaacctctaccaagcatacgctggcaagcccc

SEQ ID NO: 156 - DNA, 1055 bp, Propionibacterium acnes
cccctaggtcctgatgtgggtcgaggtccttggaatgatggaagttcctacacacccatcgccaaagacctcaacatggacaacgctaccttcaccactccctcatctgtgaagagccagtttatgcacggtgttgaaagaggcgtcggtctacgacgaatgcgggttaatggtcttgcggtgtggggcgctgggcgatggcatcgagaacgcgtgagtgggtggcgatccattcggccgcgtcggggttgatgttgcgggcgacggtgtcgatcgctgttacgtagtgggcaagcctgcgaatctcagcttgttggtcagggtgagcgctgatgaggggctcttgatgggaggcgcggttacggacgtggcggatgagctccacgttttcctcgaagtcgcgtcggctacgccccgggtagtgaggcatacctccgttacgtaagtcagtgagagctttccatacggttgcttccaggcgcggggtgagcagaaagcgccagttgtccagtgacagactcgccacgatctgatcaggggtcgcatcgagcctcgcgcgccgcagtcgcttctcggccctgtcgacgttacgcgggaaaccaccgagccgatagctcggggattcccaccaacgccgtatgccagtatcggcgctcaggcgcacgtcaatgaagtttctcaggagtacctcgacatggctgatgtcttccaagaacgctttcgagatgcgggtgttccacacgtaccacgcatcgactggttcgatccggtagcggctgagcctggcgggtgagaaccactcctgcaacgtctcacgactcaccgtgggagcgtggtaagattgatgacgataggcctcgggaaggtcaatgccgcgaaatatcggtatacccccgaggtcattgtcttgcccaggcccctcctcgcatacttgcggggcgtcattggctgccgtcatctcgtctcttcccggtacgtggctgtccatgttcacgggcaggtacggcaatgaggttcccgcacacaaacctctaccaaacatacgctggcaagcc

SEQ ID NO: 157 - DNA, 1055 bp, Propionibacterium acnes
cccctaggtcctgatgtgggtcgaggtccttggaatgatggaagttcctacacacccatcgccaaagacctcaacatggacaacgctaccttcaccactccctcatctgtgaagagccagtttatgcacggtgttgaaagaggcgtcggtctacgacgaatgcgggttaatggtcttgcggtgtggggcgctgggcgatggcatcgagaacgcgtgagtgggtggcgatccattcggccgcgtcggggttgatgttgcgggcgacggtgtcgatcgctgttacgtagtgggcaagcctgcgaatctcagcttgttggtcagggtgagcgctgatgaggggctcttgatgggaggcgcggttacggacgtggcggatgagctccacgttttcctcgaagtcgcgtcggctacgccccgggtagtgaggcatacctccgttacgtaagtcagtgagagctttccatacggttgcttccaggcgcggggtgagcagaaagcgccagttgtccagtgacagactcgccacgatctgatcaggggtcgcatcgagccccgcgcgccgcagtcgcgcctcggccctggcgacgttacgcgggaaaccaccgagccgatagctcggggattcccaccaacgccgtatgccagtatcggcgctcaggcgcacgtcaatgaagtttctcaggagtacctcgacatggctgatgtcttccaagaacgctttcgagatgcaggtgttccacacgtaccacgcatcgactggttcgatccggtagcggctgagcctggcgggtgagaaccactcctgcaacgtctcacgactcaccgtgggagcgtggtaagattgatgacgataggcctcgggaaggtcaatgccgcgaaatatcggtatacccccgaggtcattgtcttgcccaggcccctcctcgcatacttgcggggcgtcattggctgccgtcatctcgtctcttcccggtacgtggctgtccatgttcacgggcaggtacggcaatgaggttcccgcacacaaacctctaccaagcatacgctggcaagcc

SEQ ID NO: 158 - DNA, 1055 bp, Propionibacterium acnes; identical to SEQ ID NO: 157

SEQ ID NO: 159 - DNA, 1055 bp, Propionibacterium acnes
cccctaggtcctgatgtgggtcgaggtccttggaatgatggaagttcctacacacccatcgccaaagacctcaacatggacaacgctaccttcaccactccctcatctgtgaagagccagtttatgcacggtgttgaaagaggcgtcggtctacgacgaatgcgggttaatggtcttgcggtgtggggcgctgggcgatggcatcgagaacgcgtgagtgggtggcgatccattcggccgcgtcggggttgatgttgcgggcgacggtgtcgatcgctgttacgtagtgggcaagcctgcgaatctcagcttgttggtcagggtgatcgctgatgagaggctcttgatgggaggcgcggttacggacgtggcggatgcgctccacgtttttctcgaagtcgcgtcggctacgccccgggtagtgaggcatacctccgttacgtaagtcagtgagagctttccatacggttgcttcccggcgcgaggtgagcagaaagcgccagctgtccagtgacagactcgccacgatctgatcaggggtcgcatcgcgccccgcgctccgcagtcgcgcctcggccctgtcgacgttacgcgggaaaccaccgacccgatatctcggggattcccaccaacaccgtctgccagtatcggcgctcaggcgcacgtcaatgaagtttctcaggagtacctcgacatggctgatgtcttccaagaacgctttcgagatgcgggtgttccacacgtaccacgcatcgactggttcgatccggtagcggctgagcctggcgggtgagaaccactcctgcaacgtctcacgactcaccgtgggagcgtggtaggattgatgacgataggcctcgggaaggtcaatgccgcgaaatatcggtatacccccgaggtcattgtcttgcccaggcccctcctcgcatacttgcggggcgtcattggctgccgtcatctcgtctcttcccggtacgtggctgtccatgttcacgggcaggtacggcaatgaggttcccgcacacaaacctctaccaagcatacgctggcaagcc

SEQ ID NO: 160 - DNA, 825 bp, Propionibacterium acnes
cgcacccgccgcatcgtgacctcatcctcacgctgccgatcaccgtcaaccagatggtcagccacgatggtgttcacaccccatgactcatgcagttgcctggccaaggcgcccaacacctgctgacgcacctgtgacttgacgtcatcatcctccagatcctgtgtaccaaccatcacggaggccaacacatcactgcgttgctgaaccagggtgttgacgacgtcgacatcgtcgatacccatgggattgttggcgcgcgcggccacggcatgaaacgtgttggactgcaaattctcgaccagaccacgccgatagtcgttgaactgggaggtgtcggcaatgacaccggtcatgatgtaggccgacccctcggacaaggccctgtaggactcgtcgacgaacgccaccaaccccggccgccgccggtaaagtcgacctgcttcctcgtcagccagcaaccatgacagtttttgccccatatgtcctccttgctgacatgacctcgaacatggtaaactttccgtaggaaaaacggggcaagtactttcgagcggctacctcggcccccggtgggctgtccagccttgtgcggaccgaagccgggggattccttatgtttgcggcaatgatgccgctgcaccccctcatgccgtggtgtggtcctttccccgtgtgcggtgtggtgcgtcgttgactggtttgtggccccgagccttactctgaccggtaggagaacggtgtggggtctacggatagcccactcggctcccggtggaatgtccaacagggtagggttgatgagttggtccatcaggaccgtcc

SEQ ID NO: 161 - DNA, 825 bp, Propionibacterium acnes; identical to SEQ ID NO: 160

SEQ ID NO: 162 - DNA, 821 bp, Propionibacterium acnes
cacccgccgcatcgtgacctcatcctcacgctgccgatcaccgtcaaccagatggtcagccacgatggtgttcacaccccatgactcatgcagttgcctggccaaggcgcccaacacctgctgacgcacctgtgacttgacgtcatcatcctccagatcctgtgtaccaaccatcacggaggccaacacatcactgcgttgctgaaccagggtgttgacgacgtcgacatcgtcgatacccatgggattgttggcgcgcgcggccacggcatgaaacgtgttggactgcaaattctcgaccagaccacgccgatagtcgttgaactgggaggtgtcggcaatgacaccggtcatgatgtaggccgacccctcggacaaggccctgtaggactcgtcgacgaacgccaccaaccccggccgccgccggtaaagtcgacctgcttcctcgtcagccagcaaccatgacagtttttgccccatatgtcctccttgctgacatgacctcgaacatggtaaactttccgtaggaaaaacggggcaagtactttcgagcggctacctcggcccccggtgggctgtccagccttgtgcggaccgaagccgggggattccttatgtttgcggcaatgatgccgctgcaccccctcatgccgtggtgtggtcctttccccgtgtgcggtgtggtgcgtcgttgactggtttgtggccccgagccttactctgaccggtaggagaacggtgtggggtctacggatagcccactcggctcccggtggaatgtccaacagggtagggttgatgagttggtccatcaggaccgt

SEQ ID NO: 163 - DNA, 769 bp, Propionibacterium acnes
ccttcaccactccctcatctgtgaagagccagtttatgcacggtgttgaaagaggcgtcggtctacgacgaatgcgggttaatggtcttgcggtgtggggcgctgggcgatggcatcgagaacgcgtgagtgggtggcgatccattcggccgcgtcggggttgatgttgcgggcgacggtgtcgatcgctgttacgtagtgggcaagcctgcgaatctcagcttgttggtcagggtgagcgctgatgagaggctcttgatgggaggcgcggttacggacgtggcggatgagctccacgttttcctcgaagtcgcgtcggctacgccccgggtagtgaggcatacctccgttacgtaagtcagtgagagctttccatacggttgcttccaggcgcggggtgagcagaaagcgccagttgtccagtgacagactcgccacgatctgatcaggggtcgcatcgagcctcgcgcgccgcagtcgcttctcggccctggcgacgttacgcgggaaaccaccgagccgatagctcggggattcccaccaacgccgtatgccagtatcggcgctcaggcgcacgtcaatgaagtttctcaggagtacctcgacatggctgatgtcttccaagaacgctttcgagatgcgggtgttccacacgtaccacgcatcgactggttcgatccggtagcggctgagcctggcgggtgagaaccactcctgcaacgtctcacgactcaccgtgggagcgtggtaggattgatgacgataggcc

SEQ ID NO: 164 - DNA, 603 bp, Propionibacterium acnes
accagatcggccacatccgtcttggcccatctccagcccgccagacccagggaggccatcacctcatcgacgccgcgccgggtggtctcatcaaccccgtcaaacagctcgggccacctcgatgatgccgtccgtgaacgatccagattcatgacatgctcctcttcacagatgccgacgacgatcaggccgtggccgtggcaacggggtgacctgccggcgcggctcacgacgttgagccggaaccacacgagacgcaccagtgtgctgcgccgtcttgagtcgggcgctgtactgggccctggcgctgtggtgaacagcccgacgaagcaccgaccgccggctgtcctcatcgccagggcgaggcatggggcgcggcatggtgcgcccggtagcagcatccatgagggtgatccggtcagccaaaatgccgagccggttttcccacttccggggccacggcaccagcaggtcacgctgacagcccacgccgtggcgtcggcagtccacaacattttctcacggccaggatgcgagtgcagcagctccaccggaacaccagcatcacgcacccgccgcatcgtgacctcatcctcacgtgcc

SEQ ID NO: 165 - DNA, 599 bp, Propionibacterium acnes; identical to SEQ ID NO: 100

SEQ ID NO: 166 - DNA, 599 bp, Propionibacterium acnes; identical to SEQ ID NO: 100

SEQ ID NO: 167 - DNA, 599 bp, Propionibacterium acnes; identical to SEQ ID NO: 100

SEQ ID NO: 168 - DNA, 599 bp, Propionibacterium acnes; identical to SEQ ID NO: 100

SEQ ID NO: 169 - DNA, 599 bp, Propionibacterium acnes; identical to SEQ ID NO: 100

SEQ ID NO: 170 - DNA, 599 bp, Propionibacterium acnes; identical to SEQ ID NO: 100

SEQ ID NO: 171 - DNA, 599 bp, Propionibacterium acnes; identical to SEQ ID NO: 100

SEQ ID NO: 172 - DNA, 599 bp, Propionibacterium acnes; identical to SEQ ID NO: 100

SEQ ID NO: 173 - DNA, 599 bp, Propionibacterium acnes; identical to SEQ ID NO: 100

SEQ ID NO: 174 - DNA, 599 bp, Propionibacterium acnes; identical to SEQ ID NO: 100

SEQ ID NO: 175 - DNA, 599 bp, Propionibacterium acnes; identical to SEQ ID NO: 100

SEQ ID NO: 176 - DNA, 645 bp, Propionibacterium acnes
ggttgatgagttggtccatcaggaccgtcccggtggctgcgtcaatgatcgatatttcgatgatgcgcccgtccaggtcggtggtttcggtgtcgaggatgactccgactccgggttctaggagttgttcggggatccaatgggtggtcatcgtgtggctcctacagggagtgtctgggtcgggcagcggtgcaatacccgcgccatagcggtcttctctgcggcggtgacccacagctggtacttcattttgacggcgatttggcgggccacatagtcgcatctgtaggccttgttagggggtagccaggtcgctgcatccctgtctcgtttggcctcattagcgggtccgtcgacagccagcaagttcaacgggtcgttggccagggcggtgcgttgcagcggtgagagtttttgcgcgccggtaatccacgcgttcccgagggctacgacgtggtcgatttggactgttgtcgaggtgtgccggccgcgccgccaggcgagtgtggacccggtgtaggggtcgtggagtcgcccggagacgaccacgcatcgtgatccgggtttcaggtgggcctcgaccaggtcgcgggcaagggcatcgttgcgggtgtcgcatccgttgtggccccaggggcgggtcaa

SEQ ID NO: 177 - DNA, 588 bp, Propionibacterium acnes
acaaacctctaccaagcatacgctggcaagcccccctctcggccccaccacaacatcaattgctgactcgaacacctttgaggcagcgctttcggcttgcgcaaccccacccacgacaccgtccgcttactactcgaagctgagggattcagaccccacctacaccctcgattgtgaagagcctccaaagcccgatacaacgtctggcgagacaccgtgaacgacctcgccaccgcagcaacgcaccagcagcgcgggatggcttggtattagcccagcgcagggcccccaggcaccagccctaacgaccccgcacccgacgtggctagaggataagccgcacgggaggactccatacccgccgactcattccagcccgccaccagccgagccatatgatcaaccgcccgcggtaaataatccagccactcacgccggtcgtacaaggaaccggccccgctccaggcgtgtgcccaggatcgccacaacacgtcgagctcgaccaccacgcccggaatagattcccactccaaatccggatcagcggccgccacgtaccagatcggccacatccgtcttggcccatct

SEQ ID NO: 178 - DNA, 588 bp, Propionibacterium acnes; identical to SEQ ID NO: 177

SEQ ID NO: 179 - DNA, 586 bp, Propionibacterium acnes
aaacctctaccaagcatacgctggcaagcccccctctcggccccaccacaacatcaattgctgactcgaacacctttgaggcagcgctttcggcttgcgcaaccccacccacgacaccgtccgcttactactcgaagctgagggattcagaccccacctacaccctcgattgtgaagagcctccaaagcccgatacaacgtctggcgagacaccgtgaacgacctcgccaccgcagcaacgcaccagcagcgcgggatggcttggtattagcccagcgcagggcccccaggcaccagccctaacgaccccgcacccgacgtggctagaggataagccgcacgggaggactccatacccgccgactcattccagcccgccaccagccgagccatatgatcaaccgcccgcggtaaataatccagccactcacgccggtcgtacaaggaaccggccccgctccaggcgtgtgcccaggatcgccacaacacgtcgagctcgaccaccacgcccggaatagattcccactccaaatccggatcagcggccgccacgtaccagatcggccacatccgtcttggcccatct

SEQ ID NO: 180 - DNA, 586 bp, Propionibacterium acnes; identical to SEQ ID NO: 179

SEQ ID NO: 181 - DNA, 584 bp, Propionibacterium acnes
aaacctctaccaagcatacgctggcaagcccccctctcggccccaccacaacatcaattgctgactcgaacacctttgaggcagcgctttcggcttgcgcaaccccacccacgacaccgtccgcttactactcgaagctgagggattcagaccccacctacaccctcgattgtgaagagcctccaaagcccgatacaacgtctggcgagacaccgtgaacgacctcgccaccgcagcaacgcaccagcagcgcgggatggcttggtattagcccagcgcagggcccccaggcaccagccctaacgaccccgcacccgacgtggctagaggataagccgcacgggaggactccatacccgccgactcattccagcccgccaccagccgagccatatgatcaaccgcccgcggtaaataatccagccactcacgccggtcgtacaaggaaccggccccgctccaggcgtgtgcccaggatcgccacaacacgtcgagctcgaccaccacgcccggaatagattcccactccaaatccggatcagcggccgccacgtaccagatcggccacatccgtcttggcccat

SEQ ID NO: 182 - DNA, 582 bp, Propionibacterium acnes
acctctaccaagcatacgctggcaagcccccctctcggccccaccacaacatcaattgctgactcgaacacctttgaggcagcgctttcggcttgcgcaaccccacccacgacaccgtccgcttactactcgaagctgagggattcagaccccacctacaccctcgattgtgaagagcctccaaagcccgatacaacgtctggcgagacaccgtgaacgacctcgccaccgcagcaacgcaccagcagcgcgggatggcttggtattagcccagcgcagggcccccaggcaccagccctaacgaccccgcacccgacgtggctagaggataagccgcacgggaggactccatacccgccgactcattccagcccgccaccagccgagccatatgatcaaccgcccgcggtaaataatccagccactcacgccggtcgtacaaggaaccggccccgctccaggcgtgtgcccaggatcgccacaacacgtcgagctcgaccaccacgcccggaatagattcccactccaaatccggatcagcggccgccacgtaccagatcggccacatccgtcttggcccat

SEQ ID NO: 183 - DNA, 592 bp, Propionibacterium acnes
cccctaggtcctgatgtgggtcgaggtccttggaatgatggaagttcctacacacccatcgccaaagacctcaacatggacaacgctaccttcaccactccctcatctgtgaagagccagtttatgcacggtgttgaaagaggcgtcggtctacgacgaatgcgggttaatggtcttgcggtgtggggcgctgggcgatggcatcgagaacgcgtgagtgggtggcgatccattcggccgcgtcggggttgatgttgcgggcgacggtgtcgatcgctgttacgtagtgggcaagcctgcgaatctcagcttgttggtcagggtgagcgctgatgaggggctcttgatgggaggcgcggttacggacgtggcggatgagctccacgttttcctcgaagtcgcgtcggctacgccccgggtagtgaggcatacctccgttacgtaagtcagtgagagctttccatacggttgcttccaggcgcggggtgagcagaaagcgccagttgtccagtgacagactcgccacgatctgatcaggggtcgcatcgagcctcgcgcgccgcagtcgcttctcggccctgtcgacgttacg

SEQ ID NO: 184 - DNA, 570 bp, Propionibacterium acnes
accagatcggccacatccgtcttggcccatctccagcccgccagacccagggaggccatcacctcatcgacgccgcgccgggtggtctcatcaaccccgtcaaacagctcgggccacctcgatgatgccgtccgtgaacgatccagattcatgacatgctcctcttcacagatgccgacgacgatcaggccgtggccgtggcaacggggtgacctgccggcgcggctcacgacgttgagccggaaccacacgagacgcaccagtgtgctgcgccgtcttgagtcgggcgctgtactgggccctggcgctgtggtgaacagcccgacgaagcaccgaccgccggctgtcctcatcgccagggcgaggcatggggcgcggcatggtgcgcccggtagcagcatccatgagggtgatccggtcagccaaaatgccgagccggttttcccacttccggggccacggcaccagcaggtcacgctgacagcccacgccgtggcgtcggcagtccacaacattttctcacggccaggatgcgagtgcagcagctccaccggaacaccagcatcacgc

SEQ ID NO: 185 - DNA, 570 bp, Propionibacterium acnes; identical to SEQ ID NO: 184

SEQ ID NO: 186 - DNA, 581 bp, Propionibacterium acnes
cccctaggtcctgatgtgggtcgaggtccttggaatgatggaagttcctacacacccatcgccaaagacctcaacatggacaacgctaccttcaccactccctcatccgtgaagagccagtttatgcacggtgttgaaagaggcgtcggtctacgacgaatgcgggttaatggtcttgcggtgtggggcgctgggcgatggcatcgagaacgcgtgagtgggtggcgatccattcggccgcgtcggggttgatgttgcgggcgacggtgtcgatcgctgttacgtagtgggcaagcctgcgaatctcagcttgttggtcagggtgagcgctgatgagaggctcttgatgggaggcgcggttacggacgtggcggatgagctccacgttttcctcgaagtcgcgtcggctacgccccgggtagtgaggcatacctccgttacgtaagtcagtgagagctttccatacggttgcttccaggcgcggggtgagcagaaagcgccagttgtccagtgacagactcgccacgatctgatcaggggtcgcatcgagccccgcgcgccgcagtcgcgcctcggccctg

SEQ ID NO: 187 - DNA, 48365 bp, Propionibacterium acnes
agcatctacggcgaaggccccgactgctccgtactcaccaaccgcatctacaccgaccagcccaccgatgtgaccgctgcactcgccgactacggcttcaccatcgacaccaccaacacatccaaaaccatcctcacgctcacccgcacagccaccatctcccacctgctagccatcctcgatggcctaccccaagctgaggggactcactggctcaacactcaacccgacctccaccacatcaccctcgacgactccaccaccggctgggccaccaaccgcaccgacgacaccgacaccggcgtctgctacgacaccagcacccacaactggcagatctgctgacagcatgacgggcctgcccttgagggcaggcccgctaccacctgactctccctccgaaaagagggaaccacctctcggccagagcggccgagcttgagagatgagagcaataacgttcatggtcgtctccccgagtggtggggtgcgttacttagcgccgccacacggtgacggtgtcagtgccgacaaacggagacccctcgggcccacgaatgaacggggccacccactgcaggcgtcggagactgcgcttgggaccgtagggctggtgtgtccaatgcccccgcaccacatgacgggtcgtcaaccgcctaccggtcgcatcggtggtggtgtgcacctgcctcataggccgcatatcgaccacatcgtccagcgtgtcgtctccgacgaacaaccttcgccccggcggcgaatcggtcgctgtacagctagagcccgcaagatcgtcacaggagtcccttccctcgggttgcgcctcccgttttttgtactaccatattggtatggccatcgagttcactgatagtgccggcaagcacgggttcactcgcgaggacgcaatccacgcgatgcagacccctgaggtcttcacgccccacttcgaccactcccgtaccgacggcccggatgtcgcggcatgggttggtcccgcgaggggagggaggaccatcgaggtgttcgccacgttggttcccccggacacggttaccgtcttccactgcatggacgtgcgagccacgaccatcgccaagctgaatggagagcgagcatgagcaccacccctgccgggttcgacttcgacgctctggccgagtgggccgagagcgatgaggcgacccacaccccgcaaaccagccccgtgttccggggcaaggacgccgcgcgcgccagccgcgcattcctcggccgaggacggcccaccctcggcgcggaccacgccaccggcgagggccggtcgccccgccgtcaggtacggctcgacgcacgcaccaacgcgcgactcgacgcctacgcagccgcaaccggcaccagcgcctcccagatcatccgcgacgccctcgctgactacctgcccgcctgatcccaccccaatccactcgggcgcctgtcagtgccccctcttctgggtggtggtccggggcgtcaccgccccggaccagttgggtagtcatctcagttgaaataagcgattagtgatacgcccctcctgctttccggtgctgtcatgagcgtctgacaacagcgacacctcggggcagccgacggacagtcctctggctgccgctctgatcccatgcccacggcacgaaggtgtcggacagctcggtctcgtcatgtgcccaaatagcgtcgtgggcctgtcgccaagcttctcgggagccccacacgggcacgaccgggccacaccggtgtcctggtctccagtgtcgcgacactgtcgatttcggtacgtgcaatgcggcggcggtttgacggatcgacatcccagactcccgcgcgtcccagatcgccatgtggagagtatttgcctccagtgcggccgccacacttgcacgctctcgcgcacgctcgaatgcccgcctagtgctctcaaatgtcgtcacgacgcctccccctgaaaatactcagggtgtcccacggtgggacaccctgagtatttcataccccaactcgcctcaccacacgtcgacctcgacaccgatcaagcgacccgtatcagcgacattgccgtaccgctgccccgcctggtcctccagccacgacaacgcatcccgaaacagcccgacgtcttccaaagctaaaccacagtcgtagccgcccttgtcccccaaccgcacaatctggcgctcccggtggcctccctcgtcgacctcgatccacagtttcgcgtgcatccgctggcctcggccctctgacaggatctcggtgagcaggtcggaggcttgtcctcgcgcatcctcgttactgcgggggaattggagtatgtgggaggaacgacgatgggggaggttggtgacctcgtgacgcagcaggttgcgcttgtgcatctgctgatcgagacgctcgggctgacctgttgacggggttgagccgtggcgccgcttcctcggcggggtctcgatccgttgctcttccggcggttcggcgtcaggttgtggtgcgcgatctcccctaggacgggggggctcgccacctatatccgagggacgatgagacggccttccacgcttgctgcgtaccttcgcggtccggcctttgcgatcatgccgacgccgcggcggggtaacctcctcgccccgctccaactgtgttaacgcctcgaccaggttggtgccaggcttaagccctttcagcacgaaccgcaccaggcgggggtctcggccgattcgtcgggcaatctcggcttggctccacccttcggctaacagggtgcgcaccaagtcctgagcccgattgtcacgctcagtcactggtcgcctcctcggggagtcctacttgctcggcctgctctgatagagcagcccgctccgatccggtctgaggcgcttccaaagggcccggcaagacacctttgacacgcagccgcccgtccttgccgtcatcgccgcccccctgggccacagggagcgcccaggggggcacgttgctggtgtagatggcgtcgccgtggatagccagcagggtgcgggagttcatgcgtagtgctcctcccttggttgtggcgttttttccggtggtggggtcggcgatgggtgtgttgagggtgcgtacgcgggacagggcccagatgcgggcggcgatttcggggtgccaggtgtcggggtcggggcggcggcgggcggtttggtattggtaggcgatggtgtcaccggttttgttgcggatgacgtcgaagccttcgatgtcggaggggatgtcgtcggcgtcgtagacgacggtggtggtgacggggttggaggccgacatttggccgatggtcacgcgcagcatgtttttcaacgcggaggtgaggattgtcgtggcggtggggtttttgtctgcccagcgtttctcggcgatgtcgatcatgtcttggatggttttgacccatcctcggatgggatcgactttggtcagtttgatcccttcgaggaactcgatgggctgggtgatgggcccatctggtccggcttcggtgtcccagccttcgtcgatggctagtttcagttcggcggtatcgacccatgtttcgtgggtggtgccgggcacgttgggccaaaaccatcctgctcgtcctttggtgcgtttgaccggtagtaggccgatgtcgtcccaccaggatggcacggtgaagcggatgtggtagcgggccgggtgccaggggttgttggtgaacaggtcgcgggcttcggtggcgctgagcagagtggcgggtgcggcaccgatctctccggtcactgatccggcatacatgaatcggccgtcgatgtacacgaagttagggatagggccggcaggcacggtggggcgccagcccttttcgcggtcctcggggttgccgtcgtcgacgcatagttcgtagcggtgctgaggggaggtgtgttggatgagtgcgcccagttcggggtccatcggctccatgcgataggactcgggggtccgtagcttccagaggttgattccttctgctccggggcggtccatgagggcccagtcgcggtcgattctggtggcgatgatgtgggttaattcgcgccatgcccagcgggcctggattggggtgagggtctggccagggaaccattcatcagcgaccagaatgtcgaggttgcggtcggtttctttgtgggtgaaccggcctcgggcgggccgcccggacagcatgaacaggccccgcacgtgccagtcctggttgaactcgcgggtgtgagcgggggtgtcaggcagcagccaggattgaggctggtcggggatgttaccgcagacgatcaggcgtcgggcgttgtggtgtagcgcggttgttagcaggtctgacagggtcgcgtgcttggtgcgtcgtccccccagcactggcaggatctcgtttccggccgcgtcgactccccgggcggtgtcgatgtctagccacactgtttcggggtcggggggccgatgtggggcgggacggcgctgctcctggtcgtctctcatggtttcctcctttgggccagggagcggccggcgtcgagggcgttcatgcgctcgcgttgttcttcgcgtagttggtagacccggcctcgtgacactcctgctgcctcggcgatggtggtggccggcaggtggccgatggcggcagcgtcggcaaggacgtcacgccaggccaggtcaatggttcccagctgggctagagcttcgtcgcggcggcgggtggcatcagccactacggaggcccaccctgtggggtggatggtcttgacgacgattcggttgtggcggatggggccccatgcatcagcggggacttgccagccgtgattggcggcggactcggtgatcttgaggcgtcgctcaggtgcgcgggtgcgggcagtgacgtcggtgttccaggtctggactggtacccacgtcccctctcggatgcgttcgatgacgcacgtggtgacctcgtcggtgactgtgatgaccagacgataatctttcccgtctggggtggttcggtagctgggcatttcaccctcccctatctgtcaaatgagctagacacagtgtctatttaatttgacgcaaagtcaagtgtgctagacgcctttgtgtggatccgcccgcccagacaggcactcacgtctcatgacccgccgcgacgtcttaacgaaaccaaaccgcttatagaaccgctccgcagcgggcccggagggcttcagttcgagggtgagaccgtgctcgtcggcccattggcagacttgtgtgaggatctgtgagccgtggccttgagtgtgggggacggcgtggacgcacatgagcatggggccgtggcggcgcgctggcggggccacgtaggctccgccatgccagtccggtgtggtctgccagcttcgccatgtcgcggtacgccagtggtgggcttcgagggccaccatgatcaccgcgacgacgacgagcgttgcggccccgatcatggccagctcaccctgaccaggccagttcccgcagatgatccagtctcttaacgcccagatgatcgcggcttccacgcctgctgcgatcgggatgagcaaggcagaacgaaggtgtcctgccatgatctcggtgatctcgctgcgatgccatgacaaggagaattcccacgactcttgaatcatgctgatgtgtgaacggcttcttcggcttcgccctgccatagtttctccaaacgacgctcagccagctcgtcgggacacggcgacagcctgccgcactcggagcagaccccgaagtggcgcgagagagtgatgaccggctcgtcgggagcatgaaccgactcgatgcccgggtgctgctcatcggtgagtcccgaagcgtggctgatctcgatcagacggaggtggaccatgccgtcgtagctgtcggctctctcgacatggaacgggtaggagccgtccgcggtgtggcctgcaaccaggtccccgatcttcaactggctggcggtcatggttcgcaccggcggcagcggggtccgggtcgcgttgatcctcatggtctctccttgcttctgcgccttcatagatgaaggtgccacagccggggttgatgtgcggaaccacagccactttttcaataaatccatcaccacggtctcaccccttcccaaatgtgtaaaccatgatttacacatttggggcatgatcgaacccacaaccatctccaccacgccccgcgtggccatcatctcccccagcgggccagcacggttctggggcgagcctcccagcatcgcactgcgccgacacggccggtcccccatgaggtcccttccttccggggccctgctgctggtgtgggacgtcaccgttttgaccgggcccactctcggccaccgcgtgcgtcctctcagtaaggacgccgagctgactgcccggcgctggctcgaccaggtcgccgacaaccccggcttcctcgacacccttatcgaggccgcccgcatcaccgatggatggcatcacgcgacgcctccgcacattcaggccccttaccggacccttcatcagtgaacggaggtacaacgacatgaccagcgacattgacattgaccggacccacaaacccgacgaccgcgccgaggctcctctttaccggtcctgggccaggagactcgtgcacgtctccgggatgccctggcgtatcgtcgccgccttggccggggtctcccccacctccatgcaccggcttctattcggccgcaacggtcgacccgtggaatggatcggcatcaatgatgctcgcgccctgatggatatcggcatcgatgatctcgcctcagcgtccaccgaccgtatcccggcccgcgaatcccgcgagctgttggtagccctgcacaccctcggctggaccgatgagcatctaagccgctggctgaccagttccgacctcgacctggccaccacccccaaggccctctacgtcacccggctatccgccgcccgcatccaggccacctacgacatgctcatcagccagcccgtccgccgctgcggccacccccgcaccccgcctatctcgtcccagactccggttacctcgccccagcccgggcccgaggatgccgaaacgttccagcccgccctgttcgagctagccgactgcgcatgagaccccacacaaacatggttgaatcgaagggctcagccagcagccagttaccaggagtccccgtgcgtctataccgcgctgttcttacccacaccgacatccagatcaccgtccgcatctggagcaccaccgaccacgactggacctggactcccctcgacacctggacccccgacccgaccccgaccacaccagcccaactggccgacgaactccaccgacacggatggaccacccccgaggaccccaccaccctcaccaaggtgactgtgatccccgagaactggcaggccctcgtcgaccacgccctcgctgcccgaaaccaccaagccaaccagctgcgcgtcgccgagaacatcctcaccgacatcctcggcgacgccgccgacgctggcctttccgtgaccttcctcgcccaggctgccggattgtcccgagctgccttctacaaacgcagcgctaagaccatcaactctatgaggcacgccgaccagccgcgcgaagacccctcccagctcacccgagccgagaaaacagcactcagcctgggcgacgagtgatcctcacacctcctgcgacagcccggccgtggagccttcccacacgtgtctagccagcactgaccgggaaaacctattcgcggcaccacaccgggcccactcaccagtcacctacacccccgactgcccctcgcgaagacccaaccagcgaaccaagtccccaatgcgcccaccacgatcagcacacccacggcgaccaccaggtgggaagcactaaccgaccccaacaacccaagatcaaacaggccctgcccgggaacgccgagcagcccgtgatcgcgaagccatgctccgagatgaccgatgattttaggggccatcttcttcagcagggctatccctccgataccaacaacgatgaaggcgaggatttcttcgcatccgttgtttccttctccggtggggccgttcatgctgccttctcggggtggacggccagccagccgatgaggttgtcggcgacctgtcctgaggtttcgatcagttcgacctgtccggcctgccatgcccgtgatgtgccggccagcaatgatgccggggcccctgctgcgcggctgagagaagcgacttcagtcaaggcggtgcgtagctcctcgatggcgctttcgatgtaccaactgccgtcagtactagtctcagcggcatcggtggtagcgataagagcatcggtgaggtcgtcgacggcgcggtccagatcagcgatgtccggtagggctacaggagtcatggtgtgtcttccttctagggtgccttcactggtgaagggtccctagccccggccgatgtgcggtgctgtgggaaaaatgcttcccattggtccgtcttagttaggaaacttggcctaagtgctgtcgagggtcgcgtgttcgtgaccggttcgaagacactgccgccttgccttcttgtcagtggcgcttccgagatggggtcagtgggcgatggctaggccgatgagggcgccgctgcacaggctgggcgcccagggaaggaatcgggtggtgtggtgtcggaaccgatcgattagggcatatagggcgatcagagtcagcccggcgatgaccgtggcgtggatcgtgtcgatgccggttgctgcggccggggctgcccacagtggtgtgatgcgcacgtcggagaagccgaagccgcctcgggagatgacccagacgatcatccacgctgcgaagatgatggcggtagcgatgacagcacgtatcgccgcagtatggtccgagagggcggtaacgactacagccccgatccatccggcccatccggtccacgctaggactgccggtatccatgtggtgatggcgtcaatgacggcaacccatgccccgatggtggctagcagagcccaggccggccaggtgggtgctggggcccacgctacggcggcgatcatggttgtcgcagatgcagcacagacagcgatcaagcttcggagactgtaggtgtcgcggtaggcgatcttgtcggggctggcggtagctggttctggcaggacgcgggtgagggcaggccaccctgcggccgcaatagccatcacggcgaccacccacacaatctgttgcatgggtctcatcatggcccatcaacgccgaaaatgggtggccgacatgggttcactcgtcaagaggtgtacgggcggccgtggcttctcctgcgccgagcatgagggtgccagaatcctcgccagccgattcccagtcgacgatgacctggtcgccgtcaacgctggattcggcgatggtcacccattgcccgtccatgtcgatgagcatcccggcggccagctctgtggcggcaaccgggtgggctgggctgtagaggaggtcgatgtcgcgggcagggtcgtcgggttcttcggttacctcgggtggggtcgatctggctgtctcggtgtcgtcggccaggtcggctcccaggatgcgttcccattcggggctggttttcttgcccgctgaggccatcgtctcgtcgatctgttcgtcagtgggccacacaaatttctttttggtccaggtcgtggtgtcgggtcgcagctgatccagcagttccaggtcttgcggggagtgggccttgcgggggtcgggggtgtagaagaattggacttccttgggggctgattcgccggataggtaggtgccgcggccgcgtttgccgaacgggatgcccacgccgacgtgttcggagccgaacatcatgcgggctccgtcagcggacaggggtccggtggcggcacgcccggagaagttgtctcggatttcgccgcccaggaactcggcgtcggggcgttgggtccccagatcgacgtggatacggcaggcggctgccatgcgcagcagggagccgatccagccgaaaacggggcattctccgggcatcccagagaccttgatcgttgaccaccagtttttcgcgttgccgtagaactggcggtactcgtcgatgaggaccagcacgcgggtgaagtcggtctcgcgagccccttcttcttcgatgcggcggtagcggtcctccatgagagaccacagccagtggatgagggcgacctggtcggggacggtagtggcgaccatctcgatgttgggccactcccgcaggcccaggtactcgatgcgtttagggtcgatgacgaagacgcgccagttgcggcgggcaccctcgacggcgtcgccgatcatggacaccgtttttccggtacgggtgcggccggccttgagctggtgggccatgacaccggagatgtcccagaaacaggtgttgccgtcctcgtcgacggcctgggggattttctcccagtctggggagtctgggcccggaagggccacgggtcggggcaccatcgagggcagggggtggcggcgggtgacggtgatggtgtcgtgttccaggtcgaagtcgctgcgccactggccgagcatcatcgccgaggtcaccgcggccaggcgcaattggatgttcgggctggacaaatgggcgccacgttggtggtgaatggtgaagccgtccaggttcccccgatcggttttccaggaatcgacggtgaccgccgacccatagatctgagtggctacttctttagcccgttccttgtctcggtccagatcggttttgtcagggtcaggggtcggggcgcggtattgcaggacgaacccgccggccgggatcgttgcggatgtcaccgtgaactctgccggcgaccaggcagccgcggccgcctgggtgagggccattggcatggtctcgacggcagcctcctcgggggggatggtgagggtcaggcgtcgcggatgcgtcttcttgcgattccatgtgactttctgcctcaccggcaccttcgccgccgactgaatggctaggcgagctgattcggcagtttcggtacgccggccagcgcgtagcgcccgtcgtgcgtgaaggctgcccaccacagcacagcccatacacggcagccaccagcgcggatcagcggctgctgcatagcccccggtagctagtaccgcacctgaccagccggccgcgatacttttccacgccggtttcgcgccaccaggaccagcgttatggacggtctgcttcgaggctgcggagggacgagacagcggagtgctggtcatgccgcggcctccttgtggcaggtcatttcacaggcatgccggccagcgatgatgccgtggcgcaccgccccggtagccgcatagaccgcgcacaactcaaacacggggcacccatcgcaggccgccgggttcatgctttctttgtcccacgatggtgggtcatcggtgcacggcacggccaggccatcctgttgagcggcgctgatagcggtgaataggcgcagctgggcgcgaacttggtctggggtcaggttgacggtgcgggctacacgcatggggttccttcctcttcaccagtgaaggttccctagacccggccgatgtgcggagggatttcagtgttttatcgaggtgaccagccagccggtctgcgctgcgggttcaggtaccagggtcagatgcagcatggtgtggtcggctaggggcacggcgaccaggggcccgtcggcgctcgccccggtgagggtgggagttccggccacggtggtggcgggaatctggttgggtttcgcggccatcagggagcccatgagggtcggggcggcgatctggacgagggcgactttgcgggcggcgggatcgcgggtcaaccagccgcgggtgaaggtgagcgcagccgacgtgatatcggggctcagcggggctggtgtggcggcggggtgggccgttgaggagggccatacgcgcggtagcgctggcgacatcgagcgggtcggagtggggtcaggtgtggggcttagggtccgatgtggcgatggggctaccgccccggtggtgggagacgagactggttgggggtggtgttgagggcgtgggatcagggtgaaggcagccaaactggccgggatgaggatgacggccgcgccgacacttcggagcgaggtcatgtgacgatccttcggtagctcgacgggttgccgtagatcttttccacgttgatgccactatgtgggttgtcggcgctaaccatttggcctccaccgatgtagacggccacgtggtgggcagggcttccccagaggatgaggtcgccgactttgagctggtcacgggccaccgcggtgccgactttctgctggtcggcggcggtgcggggaaggctaatgccgatacgccggtacagcgccgaggtcaggcctgagcagtcgtagccgccatcggctttgccgttgccaccccacacgtaggcgtaggagttgttgtcggcgatcgatttggcccatgccacggcttcggccaggttcttcgacacaccggtctcgttagcggccccggtggcacagttgtttgacaggtgccctgtagtagtggatcccactatttgtttggccatggtttcccatttggcgtaggcatcgggcagggctgagccttgcactgcctgagctgcctgcgtcagcggcatcttctgccagtcagcgatgtcgactaaaccgggaatgtggaatccagggccgccggccgatccggggccagcgtaggtgatggtgtggcctttcaagaacgcctcggtggcgtaggcatcattgttgacctgatccagagtcccgtaccagcccggcaggatgcgctgctgaaaggggccggcgtcaccgtcaccgttagccttcgctgaggtagggtcggccccaagatctgattcttgtttggcggtcatgatagcgatgaccgctgcctgggtaggcagtttgtcacgctggaccacagtgacgatggtggtcacgagctgcttctgcctggccgtgaggcctccggcacccacagtgcctccggtgacggtacccacgcaagcatccccgccgacactgccaccgccgccagagttgtcgtcgagggccccagagcctactgacagcagcggcacaatgatcacggtcgcgggcaagaccgccaggcccgccagcatcagcactgctgcactcaccacggcgatcacgtgagatgctttcaacgctgcccacctttcgctggtttgagggggcgacgcctgctggtacgcacaggcttggttggtccagtccgccgttggttggcaggcctgggtttgatcggcttgctgggacccggtttgggctccggagtcttaggctccggcttcacatgcctaggcacttcggctgcggtgggaggagtcagcacgtggcgtaccggcttggtgaccttctgggcacccgaaacaaccggcttagacaccaccttggcacctttgaccaccggtgcggctgccttcgcgccggccttcttgactgcacgatgcgctttgatagccccggcctcggcccggccaaccctgctagcagtagcatcgagggctctgtggcccgtcgttgccctcaccggtgcatccttgccctggcgggtctgcttagcgatcgccgacatgccgcctcgcaatgccgaaacatgattgtgggcgtgggcgatcgccgacatgccggccgtcgcgatttttgactggccctgcggggcccctgccccagcacgaatctgctggtaagccgccgacgtgccacgagcacccgccgccattcgcgccaccttcgcagccctagtcactcccgtcgacacgccacccgtggctaccgcagcagcacccgagaccacagtcgaggccatccgccttcgacccaatccggtgagcttgcgaccaccgctgcgcaccatccggcgagcaccccgcccagcccactggccaatcgccgacgccccttcggaacgcttgctgcgcatccaatcgttgatcttgtccctcagccccttctcgcccttgtgacgacgccacatggacatcaagaacccgataatccccacgagctcgagcatgttgacaaccatgaccttgatggcgacatcaccgtcagaggcgaaaaccgacttgatgatgagcatgaccacacccaacatcaccatcgacccgacaatgccgatcatcgagtacaagatcgaacacagatcccggatgagcggatctgtgcggccagggatagcccgcaacacgttgagcatcgacatgaacgccgaccacaccaacttgcacacgtagaaccagcacatgcccgcgaacaccagcaggaccacagccaaacccgccaccgtcgacgagtaaaagaagaaccccaccaaccacgaaccatccgcaatatcgccggcgtaatccgacaacccctcatcacagtcaccaaggtcgtcgcgagcatccgagacgtcatcgtaagggccacccttgagcacctcgatgtacttgtcgtggcacttcgcatcaataatgcggccatagttgagctgctgatgaaccggcgccacgaacgagtccacaatgatcgccgacagcttcggatccttcgagtctcccgtcgaggtcatgtcatcaggaatctcgacctcaccagcggtcgccgtcgcaggatcaaccgaactggtaatcatatgagacagcgccacaccgaactgctgggtgcgagccagcggagtagccaacgtcgtcgtatcgcctgcgaacttcgccaccggggccgccaagaaacccaacgccagcgccgcagcaatcgccgcacgcgcacccgtagcccacgcccctgccgtacgtcccctcatcatcttgacgaccacgcccacaccggcgcacgtcgtcagcaacgtcaacaccgttccaccccagctgtccgctcccagcggggccaaaaccttgtcgtggatgtcgttctgtaaccccaccagcggtccggtaatccacccgacccagctcatcgccacggtccagtccaacaaccggcacaacagggcaatgaccatcaggtacgtgttccaacacatgccaataatggaggcccacatagccttcagcggggccgtaacgccaccatcgtccatcgacatctggtactgaaacaagtgaataccgttggagtcagtcacattgaaaccgtcacccatccagcccagccccgggcccgatgccatggcaggcacactgctcagcgccaccaccagaaccagcgtggtgacgatgatacggaaccgccgctccccggccccggggcggcgtggatgacggctcacgctgtctcctggtcgtgctcgggcgggttggagctggcggcttcgcggtggggagcgtaggcaggtctcagtagtcgaatttcaccgacgttgccgtgttggtcggcgtacaggccacaaccggggcctccggggttgagggcaatcttgaccaggtcagcgaactcttcaggggacgttttagggtccacgcccaggaactcgacacctttctgggcgaggttgatgttgtcgcacagcaacacgatgcgatgctgaatgaggttgcggacggtctcgttggggtaatcggcctcggggtcgtgggagccggtgataagccaggcattggctcggcgggattcgcgcacgtactcgtcaatggcgtgggaggcttccggcgaggacgacatgtgatgaaactcgtcaacaatgaaagcggcgtcgcgggcccggtcgctgaagcacaccaggcgagccagacgggcaatgagcgcgtagagggctcggccaaacaccttgtgcgggggcagctgccgaaacagatgttctgacagcatctcctcggcgttaggaagagcgatgccacaagtgccaatgatgaggatgtcggcactcaggtcggcgggaggaaggtccgggtcaaagatggccgaagctagggaggccgagttctcgatgtcagcgaacacggcaatcctgtcagcgatcgcggtggcctcgggaaggtcgcactcctcggccaggtggcgggccaaacgcccacacgaggtgatctggtggtcacgcatgtaggccggtttgaggaccttggccagcgtggtcccggccacaccgatggtctccaagttaagcaaggtcagcaagaacgactgggcgacctgcccggccatctccgggggaaggatgcgcagcgggtccagcgacagcttggggtgggccgtgtcgacgatctggcgtctaaccccgtcgatagagttgacaaaggttacccactcccgctcatcggagttgtcggtggcaataatgcgcccgccccgggccgcgatggctgcgcacagccgcttctcggccatcgtcttgcccgcgcccatcttgccgatgaacgccaccgtgttgcctttctgatcctgagtgtcggcatgcaaatcgaggtaggccagcgactgcaacggggagcctgtgaccacagccaacgggatgccggtggtacggcccaaccggtactcaaccaccgggatagatgcggcgaacgcggaggcgtgagtcagctgacggtaggcgttaagcgaggaggagaaccggccaccgggccgggcagcccacagcaagtcctcctgacggcccacgggacgcacccacgtgaagtcaccgaacaccggatcattgacgaacgctcctgccagctcctcggtggtctcaaagtcaggagacgagacagtgacggtgataagagcctggatctcgacctcacgctcatcggcggccagctcggcgttgtagtcgacgagcacctgagcggaatgctcgatagacatgagggtcgaagcctgggtcatctcaccgccctcgacgttgtcgagctgatcgaccgtttgacggatagcccgctgatttttctgcatcgcagcgtgacgggtccgggccactccccggatcgccacgtcgaccggcacgccagtgtcgtcgatacggcccaaaaactcgtaggcaggccacgtcatcgtgcggggcaccttacccagcacgatatgggactggtagacggtctcgccggtgtcggcaccgattttgaggacgcgacgattccacgcctgagccgtccgggacatgtgggagactcgcttgtcatcctcgctggccagcaggtcggaggtcgcggcctcatcgatgaccaactcccccagcgcggcacgtccaacctcatccatgagggcgattccctcgccaggggcatcatcacgcaaccgggtcgggtggcctgacaggtgctgccgaagccagatctgttcatcaacggtgaccgggcggggttggaacgctgccggcagtttcgcaccgaattccttagcctgacggagggcccactcccgtgcgacacggccaggagcggtggtcatgagtccggcggcttcggtgattttgttgagggcggcggtccaggcggtgtgggtgcgtattttctggtcttggttgagtttgatcgataggaaccacacgcgccggcctagggattcggtttcaggctggtcgagggtggcgtcgatttcgtcggcccacacggggtgttcgctcaggtcgaggccggcggccatggcgtcgacgatttctgtggggtcggtccaggtgagggctccgttgaggcagaactcgtggcgggcgaggtggcggaataggtcgcggtgagctgcggcgacggtgagggaggcgttctcggtgacgggtcgctggaggggagtgagtcgccaggtggcccagatgtcgccggtggaggtccagacgaggttgtcgaagaggaaccgttcggggatggacatcatgactccttttcggcggcggcgaggaaggcttccaggccgctgcggcgtacagcgttcccggtagggtgcaggggttttctgggggtgggttcagatttcgaatgtgggaggggtttgtggatggtatcggtgtcctcggcgagggcttggtcgagcaggcaggtggccggggtgtcggtagtctcgtccagctcgtcgatcatctcgtcgaggaggttgggggtggtggatgcggcccacacaggtgggatagccggtgcgggtcgaggcggtgtggggaggcggagtttggtttggccccagaggggtgtgtgggtcatgccggcgggagtggtggcggcgtgagtggtcacacgccaccagcccgccagccatgccagaggtgaccaggtccagtcgatgcgaccaacaacgaactgggcgagccatccggcagccagcgcgaaaatgaaaccgcggatggtcatgcccccgtcgataattttgaagcccatcattgcggcaggaactacgccgccgacagcgagcacctgatagatcgtgtagggcccgccaggaatccttcgacctgaggaatccttaccgataatgcggggctgctggcgggcctcggtgtgccactgaatatccacgatcagctcttgcccaatccttgcatcatctgtccgaagaattggatcgcgttaccttcgataagccagtgcgccataccacacacaaacagcatggagacgatcttggccaggctcataccgtgtttgaagatgttgaacgcggcaatgcccacgactacgaccatggcgacggctcgcaccgcggactgaccttcacctgccttgatcgtcgtccattcgaagaggttctgcgattccagtggcagcaggaggaattgatcgagcatgagaggttttcctttcaggaagccgaccgggatggtcccggtactgacgggctggacggcacgggtgtgccggccaggggcagaaggcgtgacggctggtcgagggaggcaacctcccagcggcctgcacggctgacaagagtcaggccgtactggctggtccgggtagtggattcgtcgccggtgggctggcatgtcacggtcaccgtgacggtaatcttctgccggtctgagggggtggggacctcgtcaggtcccaccacatgagtggttttcactgatacgcatggggctgggtcaaccgcggtgaaagcggtccctgggctgctccatctcgacaggtcagtattcccggtcagcatggcggttaggaagcctgaagaggcttgggcggccgggtcggcggtgcgaagctccgaggtgtctagggtgggggccgaggccggtgcaggcatggggatctgtccaggtagacgcaaggcgatggccttgccgttggaatcgacgtggaccgggactgaccaggcctgtccgctcccggattggccgcccatggtgaccacggtgacctgccacaggctcggatcagacggggagacggtagcgtcataggcggtgacggtggtgggcgctggaccaggtttgcggggcatgcgcgcatcggtgatcttggccgccaccaggtgttccagattgtccaagtgcccggagtcagaggtcagcagaagagtagtcacctcgaccgcggtggctgaggcgatctgagctgtgcggcggtcgtgatgggtggtgtcagtgctgacagctgtggtgggagcggatgccggggccgccgaacggaccagggcaacggggccgcatgcgactccgcacagcacgagggcaaggaagcctttggtggccatcgatccggtgtggggccagggacccacgttttcctgtgcctgttttttcttggccgaccaacggcgggacttagggttagcggatgcaccttctggggtgcatgctcgtctcaatcgcatcggtcacctccttcactggatgaagggaccaaggaggtgaccgatgtgcggtcgaacccgaaaaagttcaaacttttttctgggtctgcctcaagtacgacagaaggcctgcatcatcacggcgttgtggtagcagatcttgcgtcagcgcaaatgtatgggcctcgtaggagtagctcttaggtgggtcccggtggttgcggccagggcgagggtgtcgggtatgtgtagcgctagtcccgggttcgtggtgtgagggcttttgggtgctgacatgcactacccattgctagacgctgtgctgtggcatggctggacgtctagcagacgggttgacatcacctttaggctggcagcgcccgaggccgcaggccagaggaagcggacagcctaacgattgacgtccccctctcctttccccaacctcctggatgtgtgggatcagctgtgccgctcccccgacatggcagacagcaccgttgcatgagaactgactgacactgtggcgccgcggaggtctcccgcggcgtccgctggggcgagtgcatgcctgtcagctcatcttttatcgtcatgtttccccttgtcagagcggtctttgcaaagtgacaacgtcaggggtcttgacgacaacatcctcgacaacatcgtggcggtggtctgtgtctcgtcagttcaacgcaccggggaaagaggcaccgctgatgttcaccaccacaaacaccctcaacgatgagtgggaccagattcgcgccactgagatcgattggcatgactgccctgaactgatgcactgcatcgacgttgatgatgtgttggccgtcattcctgccgcccccgacgccatcttgggctacctcattgcccgggctcagggcggtgacgagttggccacccgcactatcatccaagcgttcacaggcaagcttatcttgatggccacggccaccaaggtgcgccgtactaatgacggcttcaatgatctgttggcgggtctgtgggagacgatcatcacgtacccgttggatcgtcgccctgacaagatcgctgcgaacctcatcctcgacacgttgcaccgggttacccggttctggcgtgctgattcccccgatgaggaagaggctcacggtctggtgcccttccctgacactctcatcgccccagagcccgatgaggacgtcacagctagccaggccatcgccttggcggtggaccgcaactggattaccgaggacctagcccgcctcatgagccatatttactgtgacggtatgactggagctgatgcgggtcgtctgcatggctgcgctccagctacggtgcgatctcgatgccgtgatggtcgggccgtgttgcagcgcaacgccgagacgatcctggccgtctgctgatccctctcttgctcatgcctgccgccaccctacccctacctgctagaaacatagccatgtctccagcaacgcatctagcatatcttctagcaattgatctagctatgtatatagctgatgatctagctatcatatagctgtgtctccagcccaaaggacagcccaatggcatgcttgccacaggaaggtgcgtcagcctcccgaaatactggaaggagctttaccgtgcaggacatgacctcgaccagaccgattgaccgatccccgttcgaccgcactattgcggtgtggaaccacaaaggcggcacgttcaagacgtccgtcgtggcgaacctgggatacctgttcgccgccggtggcaacaaggtgctgctggtcgacatggacccccaggccaatctcgacattgacttcggtatacccgcgggagaacgtgaacggggcatgggattagccgaggcgctacgtgaggggacggcccttcccccaccgcagcatctcagcgaaaaccttcacctggtcagtggcggcgctgctctcaacgagttcaccgaccccgcatccttagcggccatcctcgaccgagtcaccaccgcacgctacgacctgctagctcaggcccttgccccgctggcctgggactatgacctcatcttcatcgactccgggccggcacaaactctgctgtcccagaccatccttggagtagcccgctggctggtagtgcccacccgcaccgataacgcctcaatcactggcctcgtcgacgttcaagacgccatcgacggggttgcctcctgcaaccctgaccttcaactactcggcgttgtcctagccggcgtgggggcccgggccacccggatcgccgcagataaacgccacgccatcgacacagtgctgggggcaggaaccgttttcgatgcggtcatccactactccgagaaggtgtccgtgctcgcacgccagcagggcaagaccgtcgccgagctagccaacgagtaccacaacacccagcccgcctacacctacctagctaaaggccagaacatccccaacgtcgccaaggcagccgtcagcatcgaaactgattatctgaggctggccaccgagatcagcgaccgcatgttcaccagcgacgagcaggagcctgatcatgactgacgatccgactccatccgagcagaacaaccccaccagcgacgacatgcgcttggccgaagaatgggccaacagcggccgcacagtgggagccctgccgcgccgtcaacggcctcagcgacccacaccccgcaccaccagccaaccccctgtctcgtcccctgacacaccggctccgaaaaaaccccagaagacccccaccagccagcctggccgtcaacggatcaacgtcaccgtctacgttgtgcccgaactccatgagcggctgcgctcccgatcggcggcgacgggggtgacggtctcggatctggtggtgcatgcgttagcgttcgtcgccgatcatgcgggggaggcgatcgccgatgatctgcgcgtcgagacgggccccggcatgggggccggactgttcgatgtgaccccatcgcggccagtaggggtcgccaaaacccagctgggggtgcgaatgacccgccacaacaaggatggtttggaccagctgacccggacgagtggagcccgtgaccgcagccatcttgtgtctgtcgccgtgcgcgactatctcgactccaaccctgtaaagaaaggccgacatgtccgctgatgaaactcctgccgcccggggtgggcgacgctttgatacgaccgtcaagcccaggcgccgtcccatgcttatcgccgccggtatcgccatcgtgatagtcggcgcgctcctcatcactcagttgattcgctccgcccaaaccgagcatcgcgtgctggaagtccacgccgatgtggctcgcggcgaggtcatccgtgacaccgatctggtatcggtgactgtcggccaggtcgacaacgtatcaacggttcccgcagaccagctcgactcactggtcggcaaacgcgccacggcagatcttcgagccggatcactcttgcctgctggggctatcggcccggccgatgtcgttccagctccgggcaagtcgctggtcgggctgaagctagccgccggacagatccctatcggagaccttgctgccgggacgaagctgcgcctgatccagacgtcggcacccagcggctcatccaccaccactgatagcagcaccaataccgatggccagtcgtgggaggcaacaatggcgaccggcaccaaaaagaccgagcaggtcaccttgatcaacgccgaagtgaactcgcgtgatgccgcccggatcgcccaactgacgtcacagggccgtatcgccgtagtgaaggatccgatccgatgagcaccattgttttgaccagcgtctcgggagccccaggggtcaccacgacagcgatcgggctgggcagggtctggccacaatcgagcctggtcgtcgaggatgacacccaccacgccatgctggcgggctacctgcgagcctcccagcacgccgaaccgaacctggccgcagtggcgaacctgacgtcgactccaaccaacgcccaaacggtgtgggaatctatcgccagacccctacccaccgatgacccagtcggcgggctgcgacgcaaaggcatcctcggcccgcccacgccgtggtctcgcgcaggcatcgacccccgatggggattcatgctggccctgtggcggcaactggaggaggctggcatcgacaccatcatcgatttgggtcgcctagccacaccactgacctcaacgccacacctgatcgccgcacccatcgtcgaggacgccgacatgatcttggtgatgatcgaggcgacactacgcgacatcgccggcgcccgcacgatggtggagggactcgctgagcagatgaacttggccggcgcctaccgacgtctcggactgcttgtccaccgtggcggccaggcccgcggcgtcgccgagttcaatgacaaggagatcacctcggcgttacgactcccggtcatcggggccattacccacgacccggccggagccgcccaactctccgacggggtcgggcagcggttcgacaagtcacgtctggcccactcactatcaaaggtggcggccagcctcgtcgatgccataaacaagcgccacgctgatgacgaggaggatctgtgatggccagttttgctgataatccgttcgacaagctgcgctcccaggatgcggcaagagcttcggtagagcaggagcctgatgccggattagcgtcggagttgttttcgacgtcgtcggggtgggccagctctcagcaggtgtcccaagctcaaccggtgatgacccgttcggagaacgtggattggccggttgtcgcggagctagccagtacggccactgatgaggttgaggctgagatcagcaggtggagttccactcatgatggggtggcgacgctagacattcgccaggccatcgcggagcctgctattgcctcggcggtgtctacgtatgctgaccgacgccagatcgatgtaggggagacctggcctgatctggtacgccagcgataccgcaaggctgtgtgggatcagctgttcgggatggggcggttgcagccgctgttcgaaatcagcgacgccgaaaacatcatcgtggtgggtaaccatgaggtggttgtcgaccacaacgatggttcccggtcaacgctgccgccggtggccgactcggatgccgagctggaatcccagatcgcccggatggcgaggaatgcgaccccgcggcgagccttcgacgccgatcacaccgatgtgacgatcatgcaccaacagaagttccgtatccacgcgatctcttcggaggtgtcgttgcaaccgtcggtggtcatccgccaacatttgctcacccaaatcagtctgggggacctgtcccagcggggaatgatgccggtggaagtggcccggttcctcgatgaggcggtacaagctggcaagtccatcgtggtcgccggcgagcagggggcaggcaagacgacgtttttacgagcgttgatccacgccattccgatgcgggagcggttcgccacgttggagaccgatcaggagttgttcgctcatctgatgcctggccgggaaaacacgctggtgctgttcgcccgtgatggtaacggcgaggtggatccggcgactggcacccagcacggcgctatcgagatcgcccagctgattcctcctagcctgcgccaggcgttaactagggtcattgtcggtgaggtgcgcggcaatgaggcttcggccatgttccaggctatgcagtcggggactggcactatgagcagtatccactccccgcgagcctctgaggtgccgtcccggctagcccaaatgatttcgatgggcccggtctacgatctggatcaggccatgctgcagatcggtcattcgatcgactacatcgtctttgttcgtaagcgtgacctgcctgatgggagccggctgcgatttgttgagcagatccgttcagtctcgcctggtgattcgacaactcccagtcttggcgaggtgtacacggctgactcgtggacaggccagccgcttacgccactcatgcctggttcggccgccgacgagctgtctcacttcgcccgagacctggattactgcgaggcccactcatgaacactcccgcactaaccagcgccctcatcgtgaccgggttggggctgatcctggccatcgacgggctggtcccggcgccgcctcgacctggtgccccgctgagcccggcccagaggtgggctcggctcacccaccgtcccacaggagcggccgggcgtcgccgggatttgcgttgggggttggctgttctcgtcggcgtcgtgctgtttatgctcaccgggtgggtggctgcgctggcgttgggccccatcattgtgttgttggcccccaccctgctgggggcggccccaccgaccgatattccgctgatggaggcgttggatcggtgggtgcgtcaggtcgctgcggtgctgccacaggggcgagacatcatcacagcggtgcggatctcacggccgcgggccccgaagctgatcgccgggtcggtggatcaactggtgtcccggttggatggccgtatggagccgagggaggcgttccagcggatggccgacgagctggactcggctgaggctgacgcggtgctggcctcactagcgttggcggccactcatccgcggggagcctcgacaacgttgaaggctattgctggcaacatccaacagcggttgaaagtgctgcggcaagtggaggctgagcggtctaagccgcgtaactcggtgcgccagatcacactggtcacgatcgccatgttcggggggctgctcgtgatcggacggtcgtttctggccccgctggcgacccctcccggtcaggtgctggtggccgtggcggtggtcatgtatgtcatcgcactagtgcagatgtatcggatggcgcggccccgtcgacgcacccggatcatggtcaggaggacccgatgaccattactgctttgtccctgctggccggggccatcgtcactgtcggactgctggtcatcgtggcagcgttccgcccagccccaggccctgacctggttgccgctctggaggtggtgtcgggtcgcacctcaagcgtcgccgagaacgtcgaccagacccggatcgggcggataggtcgcagcgtgacccgcacattccatgtgtcggtgtccccggccatgcgggccgcactgcgactccaaggcacgacccccgaagcgttctacggtcgacgcctgatctgcgcactgatcggggcgatcctgccgtggctgctcaacgcggtagccatcgcggtaggggcgaattccccgaacctactcatcccttcggcgctgtgtgtggcgttagctggcgctggatggatgctgccggcagcacggttgaaggctgcggccgggcccaccaacgatgactcgttcgaagcgctgctggtattcatcgatttggtcgtgctggaacggctcgccaacgaaacctccgtcgacgcgctcaccaatgcggcaaacatgtcggactcgccgctattcgtccagatccgtcaagtcctcaaccgtgcctccctggaaaacgtcgacccgtggaacgggctagaccggctagccgaggacatcaaactgcccgaactcaccgatgtggtctccatcgcccgcctccaaaacgaaggcgcctccctcgtcgacagtttccgggcccgagtcgccgagttgcgcgacgcctacctgctgcgcctgcaacaagaatccaccgccatcacccagcggcttggtttgtggacgatcctgcaagccggctcggtcatgctcatcttgctgggggcggccgccctcacactcatcacagccggataaaccgacatcgtgtcgagcccccatatgggccgcgaacctttcataatgatgcctgtaagcaccacaatattgatcacaacctaacaatgaaggagaaatcatgatgaccgatctcgacctggctaaaaaacagatcacctggctggcggcgcacctgcgttcccggatcgttgacgagcgtggcggtggtagctctaccgtggagacactgatttggattggtgtcatcgtggcgctggtgattggtgtgggcgtcggggtgacggcctatatcaggtcgaagatgcctcactgacgacgatgcgtagcaggttcacaactgatcagcgtggcggtggtagcgcgtcggtggggatgctcctgctgatgcctgcgatcatgctgctggcattcggtgggatcgaggtcgggatgtggtgtcacgcccatcagtcgaccatcgcggcagcccaaagcgccgcggaggctcagcgtgtcgtccatccggtcccggggtcggcacaggaggcagcctcgcagatcactagtcatggcggggtgcgtgatacccggatatcggtcagtgatgacggggccactgtcacggtgaccgtctcaggtcgggccccatcgatgctggggctgcatcttccggctgtgtcgtcgacagcgtcgatgcccaaggagcgcctgtcgtgaggcgaagtgagcgcggtggagcaagtctaagcgtcgaggtgctcatgtgggcgccgatcgcgctggtgatcatcgggtttgttgtgggtatcggccggatgtcgatggcccaggacgcggtgaatggcgcggcgggtgctgcggcccgtgcggcgtcgttggagcgtgatggacagtcggctcagtctgcggcgcagcaggcggcgtcggcgaacctgtcgtccggtgggctggcatgtgcgccgagtgtgagcgtggacacgtcagtgtttgcccgtcctgccgggcaggcgggcacggttcacgccacggtcacgtgtgtcacctcgctgggtcttgggttcgggtcccggacggtgcacgcaacggggtctgccccggtagacacctatcgggaaaggagaggctgagatggcccgtgatgagcgtggtggcggctcggtgtcggtgtggatgctgctcatggtgccggtgattctggtcatggccggcctggtttttgacgggtcccgtcagatatcggcaacccaggcggcccaggacgcggcggttgcggcatcccgcgccggaactgatgcggcagcgacaccgcagcttgctggccacgacggggcggccgtagcagtccaagcggcccgccaggcactatctgctgccggggtggacgggtcggtgcaggaggacgggtcgaccatcacggtgaccacgtctcaaagtcggccgacagtgttcctgtcagcgatcggaatcagccaggtaagggggcatgggcaggcccatgctcagcttgtgggaccgggagaacgcccatgacagtgatacgtcgtatcggtgccctggtggcactgctggtggtgatagccggcttaccggccgggctcgtggccgcaggcgccccgctagtaccctcgggcctgtcatgggcccatgtgcggcatctgttggttaccccagacatgaccgggtcggtgctggtgtggctggtcagcctcatcggctggatcgggtgggcatggttcgccctggccgtcgcagccgaagcggtgacgatgctctcagggcagcggctgcactggcacatgcccggccctcgcctagtgcgccgagtggcagccggtcttctcattgccgcgttcgcggccgcaccggcagccacaagcacggctcacgccgccgaggccacccatgtggcggtcgccgcccaggctggaccggcacacgcggcccccgcccaggacagccccgccaccacctctcaggccccggacgcctccaccactccgaaaatctggaagacctacacggtgcgggccaacgactacctgtggaagatcgccgagcactactacggtgacggcgcccaattccgtcgtatcgccgaagcctccggtatcgacccgcactcagagctgaaagtcggccagaaactgatcctgccggttcccgagaacacggccgcagttcattcggttaaagcgggggagtatctgtgggagatcgccgagcactactacggtgacggcgcccagtaccataaaatcgctgaagcttccggtatcgatgcccattccgatctagccgtgggccaaaaactcgtcatccccgggcccctccgccacgacgccacgccgccacaccactcggcgtcgacccacgcgaaggccgccaccccagcccacacgcccacgcgacggcctgcgcctgcccacaaagccacgcccgccccgacgccggccaccccaactactccgacccacacggtgaccccagctccggcctctgccggccactcgaccagcgacgagcacccactccatacggataccgccgcagcggacaaggccagcaacgaggacgccctgtccccaatccaggtgggtttgaccgccagcgtcggactggtgctggtcgccggactgatcaccaccctcaaccgccgctaccggacccggttcacccgccagccccgcggcaaggccatgaccctgcccagcccggacgcccaaactgccgagatagcgctgcgcagcaccggggcgactgacactctgacgatcacctgcctcgaccaggcgctccgcgcgatcggcgcatggtgccaccactgcgggcacccgctgccacccctgctggccgcccgcgtcgatgacgaccggatcgacctgctgctatcccaggcggcccccgaccatcccgaggcggtggagctggccgccgacggatcggtgtggaccctcaccgccgaccggatcgacgacctgctagcccacaccgatgacaaccaagcggctccgtggccgtctctggtcacactgggacgcgacgacgacggcgcccacatcctcatcgacttggaagccgcaggaaccttgcacctgatcgccgatgacgaccaggtcgacgcggccctcgccgcgatcgccgtggaactggccacctgcgactggtccgacgaagtcaacgtcaccctcgtcggccaggtgtgcccgggcctagaagacgcactagagtctccgaccctgacccgcgccaccgacgtggacaccctcctcaccaccctagaagctcgcgccgacgaccagcgacacatcctcaccgaaggaaaccccctcgccgctcaccgagccgaccccgccatctccgacgggttcgacgccgaagtgatcctcctcgacaccgaactcaccgaagaccaccgcaaccgcctcgccagcctcgtcgaggctcttccccgcgtgtcagtcgccgcggtaacaaccagccccaccagcccagacgaatggtccctcaccctgacaggtgacccactagccgccgacctggctcccctcggctggcacatccacccccaaaccctctcccccgacctgtacaaccgcatggttgaactactcgccaactccgccgccgcagactacgaacccgccagctggtggaaccacgacgccgacgacgagcccaccaccgaccccaccaacgaggaagaatctaccccgagcaggcgagcccgcccgaatatccgcctgaccaccctgaccggcggcatcgacctatccagcgtcgacatcgacgacatcatcgacgaagccaaccaggccctcgacaacaccgaccagaccaccaaccaggttcgcgtcgacaccgaccaacccggcaccgacacccccttccccatcgacgacatcgacccgctgagctccgaccacccggtcctatccatcatcggccaccccgacatcacaggtgccactggaaccgttgggcgctccccgtggcgctgccaacagttggccctctacatcgctgagcatccgggagcatcgggggcgactatcgccgatgatttggggctatcagcgtcgacggtgcgctcgattgctacacacctgcgacactggttgggagccgacgatgccggggtggcttacatgccggcggcgacgcgcggctaccggctcgatgagcggatcgtcacagatgtggacctgatcgacgctgctgtggccggggcaggcattaacaccgctgagacggccacactggtggccattttgaagctgggccgcggacgggtcttcgctggggttcctgactcggaacttcgccagttcagggcgtcgatgtaccacgtggaggcccgcatcgtcgatgctgccctccaagtgacagaccgggccctggaagccggagacttggggctggcccggtgggcgctgacccaagggctactggtgtctcccgatcatgaggacctggtcgccggttgtctgcgcaccgaataccaggccggcaacatggacaaggtcgccgagctagttgatcacctgtcggctaccgcacgccgactgggcgtcgacctcaacgaggacaccacccggatcatcgatacggtcacccacgccgacaggagagcatcatgatctcccctgcactcatctccgtcaggaaggtccctatgcaccattatcgtcttggtatcggcactgccctcatcgccgtagcagccctcaccggctgccactcagcaggatcaacgtcggctcccacgccgacaccgagtacccccaccacaacatcgacagcatcggcgagccgcacttctagcccgaagccatcggcgggggccgtcagtgccgccgaagccgaaaaggtctaccgcaccatccacaaaaatgacttcgagttggagaagatgggaggcctagcccccaaccagccggccccactcatgatcaccaactacgcctccggccaggccctcaagagttacacgacgttcaaccacaaggtctacgacctaggcatccactggaagtcagggacctcaaccatcacggccgtacgcgagaagaccggcgatacgactcatcccgaagcggctatcgccctggaatcatgcgaggaccacagctccgtccgaaccgtggaccgcaatggaaaagccagccatggagtcatcatccatctcgatagttggtatgcccgcgacaaggcaggcaccgtcaagatgatcgcacgtaacggagtggaggttccctcatgcgacgtcaagtaatcaccgccggccttctgggcctggctatgaccaccacggcactccccgccctcgccgatagaggcggtatggatggaaaagtggacactgagggtcccgggtacgacgtttcggtagacgtgtggaatcattcccaccgcggcagcacaccccaccacggggactcgggtcatcgggataaaaagcctcaccgcgatgaccatgaagccacagccattgacggaatgtctgagtctgatgcctgggctgttgaccatgggtatggctcagcagacagctatgcgtgccgaatgatgaagtcatacctggacggggcaggatcggcagctctgtccccggcagagcgtaagagccagaccgatgacttcacgaaaaaatgcaaggcagacccgtcgggtaaagctgccccgcctgacccggcccaggtgggccggcacgcggccatgaagatggtcctgcctggggcccgaccagtcattgcccctgacccgagtctgaaccggtggcattcggcggcggtgggccaggccttgtggttgtccgtgaatgacccgactgctaccaagcgtgaatcgttgacgttcatgggtcaggctgtgtctctgacggctcgacgtaacgggctgtcgttcgagatgggtgatggtcacactgtgcattgtgatgccacaaccccgtggtcgccgtctgtggagccaggatccccgtccccgacatgcgggtacacctaccagcaggcagccccggaaggcggttatcaggtcaccgcaatcacgtcgtgggatgtgacctggtcggtactaggacacacgggcacggtccatatcgagaaggccggtgggcagatgcttccggtcggcgagttggagtctgttgttacacggcgatgactcctgatagtccgacgctgtatgaggtgttgggggtgtgccctgatgccactgatgaccagatcaagacggcgtggcgtcgtgccgcgaaagcgacccaccccgatgccggcggcgacccccaggcgttcacggccgcccagcacgcctgggaagtgttgtctgacccggactcccgcgcctcctatgatgccgccctagcgggggaggatgatcccgacgtagaggccccagacaacaccgtcgaccccttgaccccctcgtggtcgtggagtgtctccttcatcgatgccaccccgcggctacgccacacccggcccggcacgctcgccgcgatcgtggtagccgccgccggggtcgaggccgggatcggctggcatgaggcgttggaggccctcgccccctctcccgggttcgtaggttcgtggtggatgacctcggttccgctcgtggccggagtgacatggctcgcggcgatcacggggatccaggccatcatggccgggatcggctggctggggtggggctttatcggtgccgcctgcctgtggggacacccgtgggctgtggccgtattgggagccggatgggtggcctgggtagccgccgcagtgtggtggtggcgccgacggatggcctggcctgcccgcacctgccgggcaggaaacatggtcgacatgcccgaggttgacccgccatggatggagccggtggaactggtagcagaactcatcccctccgtgcgggccatgtggtctcctgacgggcaaacggtggctgtagtagccggtcggcgggtagcaaccttagggatgccgatgcgagggtggcgtggcatcgatatgcggggctggaacccgatcggtgccgacaccgcgtggatcgttgaccagataggcggctggctggccgaccaagacaaaccgctcaccatcgacgggcgcatcttgtacgagacctgggacaggctacagacagttcgtcctcacagctgagaaaaattttgggtccgccctgcatatcggggcctcttcataccttcaaaagtgtgaagggaatacagactcttcgactggaattaaaatggtatatggcgtgtccggtccgcacccagctccacgatgcgccatagaggagccataacttcaccaatcgtatacgatatgagtgtaggtgagcatctaccggtggccgacagtcagatacaagcatgggcggatgaagcagaagctgattatgacctcagcatgcttccgccgtctcgacgtggtcgcccaccggtggggaggggcccgggcactgtggtccctgtgcgcttcgacgcggacactctcaaggcgttgtcacaacgagcccctgacgaaggattgaccacgcgttctgacgcgatccgtgctgcggttaaccagtggctcggcctcggctcgtaaacattatcggcgcgacaaccttactgatgacgctgttggttacgccgtagagcacatcttgtactcgtgggcgctcgacgatgccgatgatcctcgttgctggatgatgattcggtgttgacccagctggcctcctcatggagctagttatcctcatctacgacgatggctatgaactcctgatccacgccatgaaagcccgccctcagtatctgagctacttcgctatctagtgttgttgggcgagttgaactcaacttttctccgacgcaagcgccaataaaaggctgatccatccgaataccaccaaacacggctgaagtgtggaacagattcagcaagacagggtgcggtgctcgggtgcgttggggagatgaggatattcaggcttctggcgggatgtggcttgatgacgtccaggatcaccggttcggttttgaaggtgccttgcattaatgtcgacagggtcgtacgactcgaggactggatcgaccagcccgttgcgtctgaagaacttcatccaccccggtggagctccggccgcgtactggtgcaacggatcattagcatgggtagcgtgagtatgccttcgatcgtggtcagtgctgtcatcatccaagattctgacgggcggcttctcactgtccgtaaacgaggcgccgaggcattcatgctgccaggcggcaagccggagcccggcgaggactcgcgtcaggcagtagtccgggaagtgcacgaagagctcggcgtcgcattgtcttccgacgacctgcgtcgggtgggagtgttcaccacgcgagcagcgaatgaggccggccatcaggtggtggcgacgattttcacccacaccccggttgcggtgagtgagccagctgctgagatcgagcagattcgttggctcgattggaatgtcgacgccctgcctgatgacctggccccgctgctggtcgaggcagtcatcccgtggctgcggcgccgtatccggtcggtcgctgtattcacgggtgcgaaggatggaaccgaccctcattatcgtgtcgaagcaaccgccttgggccggggtctcgcacacgccgggatcaccctggtttatggcggcgggaaggtcgggatgatgggtgctgttgctgatgcggccctcgctgctggcggcgctgtgatcggagtgatgccgcagcacttggtggacggggagatcgcccatcctagtctgactcacctcgaggtagtgcggactatgcatgagcgcaagcagcggatgagtgacctagctgacgcgttcgtcgcgctacccggcggcggcggaacccttgacgagctattcgaagcatggacatggcagcagctcggtgtacacagcaaacccgtggccttgtacgactcgaccttctgggcaccgctgaccgcgctactcaaccacatgaccatcgaaggcttcatccgccctgaggaccgcgcctcgctcgtgatcgccgataccatacatcagctgatggccgatcttgagggatggaccccaccaccaccgaagtggcgctcgtgacatagaacaaatgattctgactatggctcattgacatctgcgcagcggctactagctccattgacttcaaatcgggccttggccgaggctcggttcaggtggcccggaatggatccccacaaattgaatgctcatgatcgaggtgatgaacgcccactctattgtcctacgcccggttgtatccagcgagcaattgaaggtgctgcgcctgttggtcgaccaggccgagccactcactattgacgggaaagtcctgttcgagacctgggacgggctgcaggcagcccgtcctcacagctgagaaaaaattttgggggccgttccgcacatcgcggctctctttcacaccttcaagggtatgaaggaagtacagacaccaaaccgagctgagaactgtgcagtacggtgtgttgagccgcatatcacccatcggatgggccataatgatctctatgaggtctccccgcaagccataccagaagatccgtcgcggcccgaagccacgctgcgaagagcccgtcaggtccttgacgtgttatgtgcctcagtctctgatagatccgatcgacgagatggcgtggcagttggagatttcgaagtccgatctcgtggggtggtcggctttgtgcaccctcaatgtggtgcgcagggaccgaggcgaggaccccataccgatcccggagtatctggacaaggccgtgctcactgcgttgtatcccgatgggttgcccttcgacgaggacaccgaggagccgggcgagaatgccgggcaggaggagcttgcgatgactggatgagcccgaacatggttgaaggccgccccgccaggcgaccttcaatcaatggtttcggttgtcagctgcagccacccttgccaggtgctgtggttcttctccagaggaggagggaccgccatgaagacccagaagatctagaagatccaaaagaaccggtttcggctgttgcttcggtcttcatggtagctgatagcccgcgtcgttggaagtgcgacgacgccgatcctcatcggtatcgcaccctgttccagggtcgagaatgtgaaggattaacaaccatgacaagtcatgagacgccctccctgagggcgtcatgaccgctttaattcaagctctgccgacagctgaactgtctgctggacctggtgctagcagtccagctagaccctctgctgagggcttcatcaagattcatcacgaccttattagtgcgggcgtgtcgggtaacgcgatggcgttgttcgtcgcgttacgtaaccagcccggctgtgatcagtggacccgtcactcgtacctgcggctagcccaatggtgcggctgggatgggctgtcggaggcggcgggctgtaagcgggtgcagcgggccgctgctgagctcgctagcggtggttggctggaatcgcgggtcggccatgatcgtcgcaccgctaagacgctggtgtggcatcggttgaccagccccgacaccgaccgctgggagcaattgccgcggattgtgtgggcgaggatctgccagatcgccggggagacgtcgggagagtgggtgaggcattggctggtgtggcggatgctggccggtcgtactggtgtggctcaggcccctacgtccatcgtggctcggttcctgggctgttcttcgcgccaggtctctcatatccgtggggctctcgttgatgccggtctgctcggctgtgacgaggtctcgggggcggcgagccgggtgtggttcccctcgatggccgaggagtgtgcagcggatcgtgaggtggtcgatggggccgtcgtcgatgctgaggtgggctctggtgaaggtgtcgaggagggcggggaacccctgtcgattttgtccacccacccctgtcgattttgtccacccacccctgtcgattttgtccgccaagtattagacaaaccattagacagtgaattagaccctgggtcgcgtcagcgtgttagctcaccgccgcgcgcgcgcgcggcggccgagccgccgaagccaaagaaacccacaccaccaacgcctgaaccagcagcccccgcttcagacagtcctgtgtcagcgcacgctgatgaggctgccaagttggcgtggcagttcgtggggtggtgtcctcagctggtaggggcaccgaagaaggtacgtggccagctccgtcagctggtcgctgccgagatccgccggaatccgggctggctggatgcgccagcgttggaggttgttgcccagcgggtacgtgctgaaggtgcgctgggggtccagcactgcgagattgtgcgagccgagctgcacggggtgatcgccgaccagaaggccgcccccgcccgccccgacgccctgcacgcgcgggagcccaagtggtgggacgacgtgtactacgaaggaaacacaaccgtgtggacgtacgactctgacgaaaccagtgacgacgacgaggcgtggaaccggtcgcaggtatgtcatgttgctgagcgtgacgacatggctggcgggattgctaccaacctgctggcctcccacgctgatgatccgatggcctggctgactcgccgtcaaaccatgctgatggctcgtttcccccacgcccagaacgaggtcaccgcgatgtgccaaatcgtgcgcaccgccctggaggccgacctggccgccggaacccggtgggaggaccgatgagggcgctacgtcgaaagatcatggtcgtggtggctgtgttcaccgtcgcggtagcggggctggcgttggccaggtcgttgccgtttgccgacaggtctcagccgccgacgaccagaaatgccacccaggcggccgcaaccggtgcgggggctgcggcgggcgcgctcaaccgtctgccagtcaaaggcaaagcagcgatgaccggatacacccggacccaattcgggcaggcgtggaccgatgacaccgaccgggagttgacccgcccctggggtcacaacggatgcgacacccgcgacgatgcccttgcccgcgacctggtcgaggcccacctgaaacccggatcacgatgcgtggtcgtctccgggcgcctccacgacccctacaccgggtccacactcgcctggcggcgcggccggcacacctcgacaacagtccaaatcgaccacgtcgtagccctcgggaacgcctgggtcaccggggcccaacacctcccggcaccgacgcggcgcgctcttgcgaacgacccactgaacctggtggccgtcgacgggcctgccaacgaagctaaacgcgacggggacgcagccacctggctaccgcctaacaaggcctaccggtgcgactacgtggcccgccagatcgcagtcaaaacgaaataccagctatgggtcacccccgcagaaaaaaccgctatggcgcgggtactagaccgctgtccagcccagacacttcctaccggagccccacgatgaccacccattggatccccgaacaactcctagaacccggagtcggagtcatcctcgacaccgaaaccaccgacctggacgggcgcatcatcgaaatatcgatcattgacgcagccaccgggacggtcctgatggaccaactcatcaacccttccagcccagcaccacccactacaccgacacgatccacgaagctgaaaccgaacctcccatccccgtccgaaacatcaacgaactcatcaaccccaccaaccatgcatgaacgcacgatcgcctaccggccagccttcctgcgcgacgtgaagcggctcaaaaacaagcactacaacatgaacacacactcaaatgggcggtaaggtcacgaagtcgacgtggctgcctcacggatggcttcggcgagctcttggggtcgactccacatgggccagtggccggttggcagatccatcgcggtgaagttggtcaggtgcgcgacggcgctgaacatcggattgcctgctgcggccagctcgaggacctggacgctgggaatggagcagcagatcaacgtggttagtacatcatggcgagcgctattggacagcgcgacccgtgcccgggccacttgcgcgggttcaggaaccgcccgtgcccggaaccggtcaaggtgctcgttgctgaggccctctaaactggcctgcttgccgagagtatcgaagtcaggaagtggcagctcagctgtttcctcaggtagatctggtgcgaaggcacctccatcgctcatgggaccggagtccacccagacgatccgatggaccaactctgggtgcctgtctacaactaggctcaccggcccgttcgcgccactgtgtcccaccaggaccgcatcgccgcccatctcgtccaggatggctgagatggcgtcagcttggtcgtcgagcgtgcgcgtagtgcgctgggtgtcctccggatcgagacctggcagcgtcagccccacggctcgactgccagcagtgttcaataactcgactacctcgtcccaagcccaggctccgagccagtaaccaggaacgaggacgataggccgatgctggtcaggtcgcgatgttgaagtcatggagacatagttgcacagtgcgcggacaagggagtggcactatttctggcatgaatttagatctgggtgtccggtgaggcgatcagaacgcctccatgtactgtccgagtgtctaggatgcagcggacacagtcgagcagctggctcacaagtttccaggtgtccttctgcccctatgagggaagtcggctgctctcgcaacctttgagggctgctctggggtcggaaccagttacagatcgttcaagttccgggaactaccgccggtcacgctgattgattcccgggcgatctcgcttctgacgacagtggtcggtgaccgagaggagtcctactctgaccccgctgctgcggtgagtaaatcacgggcgtcccggatccggccacccgtccaagtgccagccagcttgatcggctaggcatcgtcaaggagcgacgatgaggtgatgatgcgatgtgagcgcaccgcgaagtgaggtataaagaagccttcccgggcgcatgcgtcgcccaggaaggccaggttggcccctggacggctgaatggttgggcggatcagactgtagcggagacgtgcagtacctcgtaggcgatggcgttggttgggctctggtctgcatcgtggctactgagttcgacgaggatgacggtccaggtggtgatgtcgacggcggtgacgcgggcgatggtggaatcagtggatgctgcaaggaagtcggcggttatgtcttcgatgcagtgggacggagcagtgctggtgggcaggggcacggtcttgacggtcaggcttcgggcagcagagtaatcggcggttccgttaacaagctggtggacggtccagtcctggatcgggtgccggccgaagtcgcgtacgatagccgagtaaccaagttcgccccagcagaactggcgcatcccctctatgtcgcgccagacgtagaagggcgcgtaggagttctggggtgcgcctttgaccttttcttggatgaggtaggccttgaactccagtccatggtagccgtccatgaggtgtccagtctggatgacgcggtcgcggatgatctgcatgtcatagtcggtgggcagggtgatctgatattgcatggcgtacatcagcggttctccttggtttcgtgggagtaggtcgtgggggtgacgggttcctgccaatcgatggttgacaagtcgtcggcggcttgttggtaggtaaggtggatcattggctgtttgagtgcagcgccatgccagtgtctctggccggcgtcgatccagatggattcgcccttggtcaggtgctggggtgcttgtccttcaatatggaccagggcaacgccgcccgtgacgtagaggccctgtcccttggggtgtgtgtgcctcagcggcaaacgtgacggcgtgggcggcacgcccggcgtcttccgtggcacgatcggccggatccatggcggcgcgcagctgctgttctgcagccaggcgtccaggtcacggcgggcagcatcgacacccagggcagcctcgacggcttcagggctacgacgctggccgggctggttgaccgcagaccactggtgccgggcgtcgtccagatcatggccggcggcgtcgatgagggcggtggtggcttcggcgcagcatcgcctgatccactccgaacgtgacaggccagctgtctcggcggcactgtcaatgcgcgccaggagagatttcatgggcgctcatctgtagcctccagataggcgttgatgtagcgcagagcctgatccgtcatgtcgatggcggctgcctcggcagacgacacaacgggctgtggatgataagaccacccaacatagacggcgaacatcaatttctcgacagctttcatgaggcccccggcggcaaccgcatccgcctcatcatccgaggagaaccacttcaggtctgaacggctgtacatagcccctaggtcctgatgtgggtcgaggtccttggaatgatggaagttcctacacacccatcgccaaagacctcaacatggacaacgctaccttcaccactccctcatctgtgaagagccagtttatgcacggtgttgaaagaggcgtcggtctacgacgaatgcgggttaatggtcttgtggtgtggggcgctgggcgatggcatcgagaacgcgtgagtgggtggcgatccattcggccgcgtcggggttgatgttgcgggcgacggtgtcgatcgctgttacgtagtgggcaagcctgcgaatctcagcttgttggtcagggtgagcgctgatgagaggctcttgatgggaggcgcggttacggacgtggcggatgagctccacgttttcctcgaagtcgcgtcggctacgccccgggtagtgaggcatacctccgttacgtaagtcagtgagagctttccatacggttgcttccaggcgcggggtgagcagaaagcgccagttgtccagtgacagactcgccacgatctgatcaggggtcgcatcgagcctcgcgcgccgcagtcgcttctcggccctgtcgacgttacgcgggaaaccaccgagccgatagctcggggattcccaccaacgccgtatgccagtatcggcgctcaggcgcacgtcaatgaagtttctcaggagtacctcgacatggctgatgtcttccaagaacgctttcgagatgcgggtgttccacacgtaccacgcatcgactggttcgatccggtagcggctgagcctggcgggtgagaaccactcctgcaacgtctcacgactcaccgtgggagcgtggtaagattgatgacgataggcctcgggaaggtcaatgccgcgaaatatcggtatacccccgaggtcattgtcttgcccaggcccctcctcgcatacttgcggggcgtcattggctgccgtcatctcgtctcttcccggtacgtggctgtccatgttcacgggcaggtacggcaatgaggttcccgcacacaaacctctaccaagcatacgctggcaagccgttgcatgagacgacgcctccgcccgccacaccaacggtcaccgccacggccacggtgaccgtgaccgtggcaccgaaacccaagccaaagcccaaggccaagccaaaggtaaaacccaaaccgaagcccaaggcccattcatgatcgcagtgcccgatacaaggtggagcggcccacaccaagctgggccgccaccttcgttttcgggacaccctcggcaacgaggcggcgagcgcgggcaagctggccctcgctcaatgccggtttccggcctcgatagcggccctgcttcttcgccaccgcgatcccctcggcctgtcgttcatggatcaacgcccgctcgaactcggccaaggcacccagcagatgcaacatgagctggctcaccggatcagcggaccccggcccatagacctgacccccaaggagccccgatctgcgccgaggcccgcaccgtccaccacatcagccccgacgatctcgcgacagcccccacgttcacccaggtgcggccccggctggaggatgtggtggccgatcgggtggtcatggcctggaacgcctcgttcgaccgggagcgaatcgaagcggaatatgccctagcgggcctggatgctccggcgtggccgtggtgctgcctgatgcgtttagaggcgtccgtgatggggtgccagtggcgtcgactagacggaccccaccggggccttggtgatgtgatcgccgcccgccgccggcttatagcgttacaagagatgcgggtcgccaggatgacgagtgaggggcaataaccaccaccccgaaaggacatagatcatgagtgagattcatttgacgggtgttcgcagcggttagagggcagtggcttcgtcgatggtggtgcgggggagttggtagaagcgggcgagggcgtcggcgtcgaggtgggggtccatggtggaggcggcgatgatggtcccgtagagggtccacgtggtttcgttgtcggtggggttgtcggcccagtgttggcggagttcggagaaggggtggtggttgaggaggaggcaggctcccatggagtagtcctcgatttcgtcggcggtgaggcggttgatgtggttgatgtcggcgaggacggcatcgaaggtgtcggcttcggtttcggttggtgcgtccatgtcaatgttcatgggggaagccctagggcgctggtgggtgttgtgggggcttgacacggatgtggtgggtatcgtgggggtgcaacttctgtgggagttgttggctttactgagagatcccccggctgtggtggctgggggatcgttgtatgtgggctggggtttcccctcgcaacacgccgatacgcatatatacagatacatcgatgtacatgtgtaatgatgtatttatgcgtagtatttctattgttaacaccaagggtggggttgggaagacgaccacggcggtctacctagcaacggccttagccgctcagtaccgagtcatcttgcttgacgccgacccgcaaggatcggcgacgtcatgggctaccgacgctttcgaagccggtgaccagttggacttcgaggtccgcccggctaatgcccccattgtcaggcgctgccgtgacatcgacgccgacctcgtcatcatcgacactccccctggtgactctcagacgattaccgcagctctcgacgtcgccgatgtggtcatcatcccgaccgagtcgggggacctggacatggatcgagcgctaatgacctaccaggtggcccacggcacgcgccgggccttgctcttcaacaaagccgattggaccaggcaataccgtgatgcccacgacggagccgccgccgtagagggtctagacgttctcgatgcgcaagttcatcggcgggtcgcctatcggcaagccatcgggacccgaccagacgacctcggagagttcgcccaggttgctgcccagatcaaggagatgctgaagtgagtaagaaccgcaaacccaccgccgcagacaaggccagccgctacagcggccagatggcggccagccagggggccagtgttgccgaaaccttccagtcagccaagaccccgattaccccgttcaacgtcaaactgcctaccgctacccatacggcgttaaaaatgaaggccgttgccgaccacaccaccatgaacgaccttttgcgcaaggccctggaacacacctacggcttcccttacgacccctaccagtgaaggacgagacaccacgccatgacctgggagcggctttagctggtggtggtgggctgggattgtaagggtgttgcggggttcgtgttggtggtgggtgttacaggtgtctagcagggtaggttggtgtacatgatgataggtgtatgagtatctatgtatctttctatcggggcttatcggtagatgtcgcggcggtgaccgatggacagggcaaggatgatgaggcggtcatcgttgagtgtgcatatgaggcgataatcaccgatccggtagcgccacagtccagaaagatcaccggtgaggggcttgccgtggcggcggggatcgtcggtgttgtcgatgtttttcgtgatccagccgtgaatgagtttttgggtgtagcggtctagctttttgaattctttatcgaaccggctagtggtttcgatctgccaagtcataggtcacactcgtcccatagctcgctgatgggacgagactggtagttgtcgttggcgtagtcggtgagtgcctcacgggctacttgcagatcgaactcgtcggcgatgcggtcgaagagggcttgcttgaaagcctcactcagggactgcgagtgtaggtgggcgtaggaatcagctaagcggcgctcatggtcggttaaacggatggaaaaactcatgatgtcacctcgtaagacgtctatagtacaatgtactacacgagggtgggggagtccactcctcgaccccgcgtagtacgtatcaggggtatggagattcaggcggcgggaacggttcccctgtcggggggtgaggggcgaccggggtgagccggtcgccccgtggggctcactgtgcggtgagctgcaacgcctcggcaatcgcgtgggaggtcttcgcgacgtgctcggcggcagcttcaatcgcggcgccgtctgcttccttcgcccagccggcaacgtacccggctgaaatgggtgcagagtccaacttcccctcaagggcaggcccgtcatgctgtcagcagatctgccagttgtgggtgctggtgtcgtagcagacgccggtgtcggtgtcgtcggtgcggttggtggcccagccggtggtggagtcgtcgagggtgatgtggtggaggtcgggttgagtgttgagccagtgagtcccctcagcttggggtaggccatcgaggatggctagcaggtgggagatggtggctgtgcgggtgagcgtgaggatggttttggatgtgttggtggtgtcgatggtgaagccgtagtcggcgagtgcagcggtcacatcggtgggctggtcggtgtagatgcggttggtgagtacggagcagtcggggccttcgccgtagatgctgatctccacgctggtgccgtggtagtgggcttcgtaggtttcgtcgatcatccatgttgtggcccagtcggcgtcgacgagggtgtagggggttcgggtagtgggaagtccgatgtagggcttggtcaccatgttgacgtgtgcggtgtacttcatcgtcgttgattcctttcccgatctctcgttctgcttataaatatatagcccgatagacagactgtcaagagtactggataaataatctaatacgcttgacttgaaggatagttgagagaataactcacatgtgagatgccatcagcggcgcagaatgccccctcctggccccttgccgccccttcgggtggccaaggctgtaaaccgcagcgatacaggcttacaggtgccccgaaggggcgcctatccacgcgctcacccgacgccgaaggcgtcggcaggccctgcccgaagggcagcggctgcccccc

SEQ ID NO: 188 - DNA, 53136 bp, Propionibacterium acnes
ggtgagcgcgtggataggcgccccttcggggcacctgtaagcctgtattgctgcggtttacagccttggccacccaaaggggcggcaaggggccaggagggggcattctgcgccgctgatggcatctcacatgtgagttattctctcaactatcctttaagtcaagcgtattagattatttatccagtactcttgacagtctgtctatcgggctatatatttataagcagaacgagagaccgggaaaggaatcaacgatgaagtacaccgcacacgtcaacatggtgaccaagccctacatcggacttcccactacccgaaccccctacaccctcgtcgacgccgactgggccacaacatggatgatcgacgaaacctacgaagcccactaccacggcaccagcgtggagatcagcatctacggcgaaggccccaactgctccgtactcaccaaccgcatctacaccgaccagcccaccgatgtgaccgctgcactcgccaactacggcttcaccatcgacaccaccaacacatccaaaaccatcctcacgctcacccgcacagccaccatctcccacctgctagccatcctcgatggcctaccccaagctgaggggactcactggctcaacactcaacccgacctccaccacatcaccctcgacgactccaccaccggctgggccaccaaccgcaccgacgacaccgacaccggcgtctgctacgacaccagcacccacaactggcagatctgctgacagcatgacgggcctgcccttgaagggttggactctgcacccatttcagccgggtacgttgccggctgggcgaaggaagcagacggcgccgcgattgaagctgccgccgagcacgtcgcgaagacctcccacgcgattgccgaggcgttgcagctcaccgcacagtgagccccacggggcgaccggctcaccccggtcgcccctcaccccccgacaggggaaccgttcccgccgcctgaatctccatacccctgatacgtactacgcggggtcgaggagtggactcccccgccctgagcagtacactgtactacacagtcattgaggatagaggtgacgtcatgagtttttcgatccgtttaaccgaccatgagcgccgcttagcggactcctacgcccgcctacactcacaatccctgagcgaggctttcaagcaagccctcttcgaccgcatcgccgacgagttcgaccttcagatagcacacgacgcactcaccgactacgccaacgacaactaccagtctcgtcccatcagcgagctatgggacgagtgtgacctatgagctggcagatcgaaaccactagccggttcgataaagaattcaaaaagctagaccgctacactcaaaaactcattcacggctggatcacgaaaaacatcgacaacaccgacgatccccgccgccacggcaagcccctcaccggtgatctttccggactgtggcgctaccgcatcggcgactaccgcctcatatgcacactcaacgataaccgcctcatcatcctcgccctgtccatcggtcaccgccgcgacatctaccgataagcccacaccacccccaaccaccaccaacccggtgcataaatacacatacagctatacacctatcatcatgtgcaccaacctaccctgctagacacctgtaacacccaccaccaccagctaaaaccgctcccaggtcatggcgtggtgtctcgtccttcactggtaggggtcgtaggggaagccgtaagtgtgttccagggccttgcgcaaaaggtcgttcatagttgtgtgttcggcgacggccctcatcttcagcgccgtgtgggtagcggtaggtagcttgacgttgaacgcggtgaggggggtcttggccgactggaaagtttcggcaacactggccccctggcttgccgccatccgaccggtgtaacggctggccttgtctgcggcggtgggtttgcggttcttactcacttcagcatctcctggatctgggcagcaacctgggcgaactctcctagatctgttggccgggtcccgatggcttgccgataggcgacccgccgatgaacttccgcgtcgagaatgtcaaggccctctacggcggcggccccgtcgtgggcgtcacggtattgcctggtccaatcggctttgttgaagagcaaggcccggcgcgtgccgtgggccacctggtaggtcatcaaggcccgatccatgtccaggtcccccgactcggtcgggataatgaccacatcggcgacgtcgagggctgcggtaaccgtctgagagtcaccggggggagtgtcgatgatgacgaggtcggcgtcgatgtcacggcagcgcctgacaatgggggcattagccgggcggacctcgaagtccaactggtcaccggcttcgaaagcgtcggtagcccatgacgtcgccgatccttgcgggtcggcatccaacaagacgacccgatcctggcaagacagggccgtggccaggtagaccgccgtggtcgttttcccgaccccgcccttagtgttgacgatagaaataatacgcaccataaatacatcattacacatgtgcatctatgcatcagtacacatatgtaccggcgtgtcgcggcaggaaaaccacccacatacaacgatcccccagccaccaccaactccgagatcttatgaagagacaactcccacaggagctacacccctcacaggagcccaccagatccgtgtcaagcccccacaccccctaccagcgccctaggcttcccccatgaacattgacatggacgcaccaaccgaaaccgaagccgacaccttcgatgccgtcctcgccgacattaaccacatcaaccgcctcaccgccgacgaaatcgagtgctactccatgggagcctgtctcctcctcctcaaccaccaccccttctccgaactccgccaacactgggccgacaaccccaccgacaacgaaaccacgtggaccctctacggggccatcatcgccgcctccaccctggacccccacctcagcatcgacgccctggcccgcctctaccagcttcccctcgacctcgtgacccaagccctcaccgtctaagcgccgataagcgggggagaggtagcgcactatcggctaaggaaccccacaaacaccaaacccttgtcactgggaagggtttggtgttatgctggtctcacaactcaacagaggaggtgagacatgggaaatgagtaccagaagtcgctcaaagtcctgttcaagaaactggaatctgagcaaggagcccgcatcgagacccggcgcaaaggatggatgatctacccgccggatacgtcacgaccagcggtcatgatccacaagactccatcagatcgcagagcatgggccaacatgctttccgaactgagacgctcaggattcaccgtctaactcagtgaagggggctggagctccagccccctttcaaccacctcccccggacaccacacaagaaaaggagaacatgatgtggcacgttcggttgtcgcttcgcgcaatcagcgaggacatgctgttcgacgccctggacaccctcgaccccttatccccggtggccacactgggccccgatgagcacaccggatcattggcggtgttcgtcgaggctgactcactgacagacgccatcgagactgcccgcacagccatcaccaacgcatgcaacaccgccaccataaccggcgtagaagcccgccccgaagacgaatgcttcgcagacgttgaccggcccctgttcccgccagtggtcggatacaccgaaatcgctgaaaccgcaggactctcacgtcagcgcatccgccagctcgcaggcaccgccgggttcccggcccctgtcatcgaaaccgcccaggggccgctgttccccaaagccgcagccgagcagtggacacgaacacgccagcccaaagcaggccgcccaaaactccagaccaccacctcataacacatcccgtgtgctgaacctgttggccggcccagcacacacccccaggggccgggcccagcccggccccgccccacacccagccgctccctgttgccgccgtggcgaaacgatcaggcgagccacgaccatcaccaagctgaacggagagcgagcatgagcaccacccctgccgggttcgatgtcgacgctctggccgagtgggctgagagtgacgaggcaacccagaccccgcaaaccagcccggtgttccacggcaaggacgccgcgcgcgccagccgcgcattcctcggccgaggacggccggcactcggctcagaccgcgctaccggccaggggcggtcacctcgccgtcaggtccgcctcgacgcacgcaccaacgcccgactcgacgcctacgcagcccagaccgtcaccagcgcctcccaggtcatccgcgacgccctcgacacctatctgcctgcctgatccaaccccaatccactcgggcgcctgtcagtgctggtgttctaggcggtggctggcatcgacggcatctgctgcaacgctataagcctctgcctggctgctatcacgtcgccgaggccccggtgtggcccgtctagtcgccgccatcggcagcccatcatggccgcttctaaacgcatcaggcagcaccacggccacgccggagcatccagccctgcgaggccatactcggcttcgatacgtccctgatcaaagggggcgttccaggccatgacgacccgatcggccaccacatcctccagccggggccacaccggtgtcctggcctccagtgtcgcgacactgtcgatttcggtacgtgcaatgcggcggcggtttgacggatcgacatcccagactcccgcgcgtcccagatcgccatgtggagagtatttgcctccagtgcggccgccacacttgcacgctctcgcgcacgctcgaatgcccgcctagtgctctcaaatgtcgtcacgacgcctccccctgaaaatactcagggtgtcccacggtgggacaccctgagtatttcataccccaactcgcctcaccacacgtcgacctcgacaccgatcaagcgacccgtatcagcgacattgccgtaccgctgccccgcctggtcctccagccacgacaacgcatcccgaaacagcccgacgtcttccaaagctaaaccacagtcgtagccgcccttgtcccccaaccgcacaatctggcgctcccggtggcctccctcgtcgacctcgatccacagtttcgcgtgcatccgctggcctcggccctctgacaggatctcggtgagcaggtcggacgcctgccctcgcgcatcctcgttactgcgggggaattggagtatgtgggaggaacgatgatgggggaggttggtgacctcatggcgcagcaggttgcgcttgtgcatctgctggtcgagacggtcgggctgacctgttgacggggttgagccgtggcgccgcttcctcggcggggtctcgatccgttgctcttccggcggttcggcgtcaggttgtggtgcgcgatctcccctaggacgggggggctcgccacctatatccgagggacgatgagacggccttccacgcttgctgcgcactttcgcagcccgccccttgcggtcacgtcgacgcggcggcggagtgacgtcctcaccgcgcgctagctgcgtcaacgccgccaccaggttggtgcccggtttcagccctttcagcacgtagcgcagcaggcgggggtctcgcttgattcgtcgagcgatctcattctggctccacccctcggccaccagggtgcgcagcagatcctgggcccggctgtcacgctcagccacggctcaccccctcagggatgcctgcctgctcggcctgctctgacagggctgctcgttccgatccggtctgcggcgcttccagagggccaggcaagacacccttgacacgcagccgaccatccttgccatcgtcgccgcccccctgggccacagagagcgcccaggtaggcacgctgctggtgtagatggcgtcgccgtgaatggccagcagacagcgagttctcaacgctcctcccctggttgtggcgtttttcccggtggcggggtcagcgatgggtgtgttgagggtgcgcacgcgcgacagagcccagatacgggcagcgatctcaggatgccaggtgtcaggatcaggacggcgacgggcagtctcgtactggtaggcgatgacgtcaccatggttgttgcggatgacctcgaaaccttcgatgtcggagggaatgtcctcagcgtcgtagacaacagtcgtggtgacggggttggaggccgacatttgcccgatggtcacgcgcagcatgttcttcaaagcggaggtgagaagcgcggtagcagtggggctcttgtctgcccaacgactctcagccatcccgatcatgtcttggatggttttgacccatcctcgaatggggtcgaccttggtcagtttgatccctgccaggaactcgatgggccgactaatgggcccgtcaggcccgaactcggtatcccacccttcgtcgatcgcaagcttcaactcggcggcatcgacccacgtctcgtacgtggcaccaggcacattgggccaaaaccatcccgctcgaccctgggtacgtttgaccggaaacaaaccgatgccatcccaccaggacggcacggtgaaacggacgtggtaacgggccggatgccaaggatcgtcagtaaacaggtcgcgggcttcggtggcgccgagcagagtcgctggtgcggcaccgatctctccggtcactgatccggcatacatgaatcggccgtcgatgtacacgaaattagggatagaaccggcgggagcagtaggccgccagccctcttcccggtcaccagagtcaccggtatcaacacacagctcgtaacggtgctgaggcgatgtgcgctggatgagtacacccaattcagggtccatcggctccatgccataagactcaggagtccgcagcttccaaaggttaatgccctcagccccagggcgatccatgagagcccaatcgcggtcaatcctggtagcgataatgtcagtcagctcccgccatgcccagcgagcctgaaccggagtgagaacctggccaggaaaccactcatcagccacaaggacatccacgttgcggtcggtctccttatgagtaaaccggcctcgcgcaggccgacccgccagcatgaacaagccccgcacgtgccaatccttgatgaactcgcgagtgtgggcaggagtatcaggcagtagccacgactgaggctgatcagggatatcaccacagacgatcagacgtcgagcgtgatggtgcagcgcagtcgtcaacaaatccgacagagtggcgcgcttagtgcgccgaccccccagcaccggcaaaatctcgttcccggccgcgtcaaccccccgagcagtgtcaatatccagccacaccgtcacaggatcaggaggccgatgaggggcaggccgacgccgctcctgaccatcactcacgacttcctcctctgagccagagaacggccagcatcaagggcattgacacgctcgcgccgctcctcacgcaactgatagacccgaccacgggacacccccgcaacctcagcaatcgtggcggccgataaatgcccaatggatgcagcatcgacaagaacctcacgccacgccaaatcaatcgctcccagctgagctagagcttcctcacggcggcgggtggcgtcggccaccacgcaggcccaccctgcagggtggatagtctccacgacgattcggccatgacggatgggtccccatgcatcagcgggtacctgccagccatgatcagccgcggactcggtgattttgagtcgtcgctcaggtgcgcgggtgcggacagtagcgtcggtggtccaggtttggactggcacccacgccccttctcgggcgcgttcgatgacgcacgtggcgccatcgtcggtaaccgtgatgaccagacggtagtccttcccgtctggagtggttcgatagctgggcatgtagccctccccccatatgtcaatctaactagacatattctctagcctatttgacacattgtcaaggacaatagacctttcgtgtgaatccaccccgtcaaatgcacactcacgcctcatggcccgccgtgacgccttaacgaacccgaaccgctcataaaaccgctccgcagcatccccagaggatttgagttccaaggtgaaaccttgctcgtcagcccattggcagacgtgggcgagaacctgtgatccgtagccctgatttcggggggcggcatgcacgcacatcagcatgtgaccatgacggcgggtcggcgggctgacataagccccaccacgccagtccggtgtgatctgccaacttcgccatgccgcagcgcgccagcggcgggcctcggtagccaccatgatcaccatgatgatggacagggctacgacgccgactatggtcagctcactccagccaggccagttcccggagatgatccagcctcccagcgcccagatgatcatggcttccacgcccgccgcaatcgggacgagtggggcagtacggatgcggcctgccatgatttcggtgatctcgctgcgatgccacgaccaagagaactcccacgaggcacgaattaggctcatgcgtgaacggcttcctcggcttcgctttgccatagcttctctagacggcgctcggctagctcgtcggggcacggcgacagcctgccgcactcggagcagaccccgaagtggcgcgagagagtgatgaccggctcatcgggggcatgcaccgattcaacgaccgggtgttgctcatcggtgagtcctgaggcgtgaccaatctcggctagacggaggtgaaccataccgtcgtagtagtcgacgccctcaacgtggaacgggtaggagccggccgaggtgtggcctgcaaccagatccccgacttccagctgactggcggtcatggaccgcaccggtggcagcggggtccgggtcgcgttgatcctcatggtcactccttgcttctgcgccttcatctatgaaggtgtcataaccggggtcgatgtgcggagccacagtcactttttcagcagatccatcatctgggacccaccccctcccaaatgtgttaaccgtgatttacactttaaggcatgatcgaacacacaccgacacccgccgcacctcgcgtggccatcatttcccctagcgggccaccacggttctcggccgagcctcccagcgccgcgctgcgacgccatggtcggacccgcatgaggtcccttcccctatcccctcacattcgcgcctgggtctccaccagcggtcgtaaacccaatcccatagccaccgccctgatctggatgcataccggagccctgctgccggtgtgggacaccgccgttttgactgggcctgccctcggcagacgtgtgcgccctctcagcagtgacgccgaactgacctctcggcggtggctcgaccaggttgccgaccatcccggctttctcgacacccttatcgaggccgcccacatcaccgagggatggcatcacgcaacacctccgcacattcaggccccttatcggacccttcatcagtgaacggaggtacaacgacatgaccagtgacattgaatggggccacagccctgatggccgcgccgaagccttgctgtaccgggcttgggccaagatgctcgtgcgcgagtccaggctgccctggcgtatcgtcgccgctctcgccggggtctcccccacctccatgcaccggcttctgttcggccgcaatggccgacccgtggcatggatcggctccgatgatgcccgcgccctgggggccaccaacatcgaagacctcacctcagcggccaccgaccggataccggcccgcgagtcccgcgaattgctggtagccctgcacacccttggctggaccaacgcgcacctgagccgctggctcaccagctccgacctcgccctggccgacactcccaaggctctctacgtcactcgactatccgcagcccgtatccaagccacctacgacatgatcgtcagccagcccgtccgccgcaccggccacgccagcacaccgcctgtctcgtccccgcaccccgctgccttatcccagcccggggtcgccgccaccaccgagatagtccagcccgccctgttcgagctggccgactacgcatgagaggttgcacacatggttgaatcgaaggacccgaccagccaccaggaggcccccttgcgtctatatcgcgctgctctcgccgacatcgacatccaggtcaccgtccgtatctggagcaccgccgatcgtggctgggtctgggcccccctcgacacctggacccctgacccgacgccgaccacaccagcccagttgtccgacgagcttcaccaccacggatgggtcaccgccgaggcccccaccaccctcaccgaggtggatgtcacccccgagaactggcaggacctcgtcgaccacgccctcgctgcccgcaaccaccaagccaaccagctgcgcgtcgccgagaacatcctcaccgacatcctcggcgacgccgccgacgccggcctgtctgtcaccgctctcgcccgcacgaccggactatcccgagtcgccgtctacaaacgcagcgccaaaaccatcgactccatgagacacgccacccaggccggcggaatcctcaccccctcctgtctcacccacgctgagagaacagcgctcggcctgcccgacgagtaacccccatctcggaagcgccacgggcaagaaggcaaagcggcagtgtcttcgaaccggtcacgaacacgcgaccctcgacagcacttaggccaagtttcctaactaagacggaccaatgggaagcatttttcccacagcaccgcacatcggccggggctagggacccttcaccagtgaaggcaccctagaaggaagacacaccatgactgctgtagccctaccggacatcgctgatctggaccgcgccgtcgacgacctcaccgatgctcttatcgctaccaccgatgccgctgagactagtactgacggcagttggtacatcgaaagcaccgtcgaggagttacgcgccgccttggctgaggttgcatcccgtggccgcgcagtaggggtcccagcatcattgctggccggcacatcgcgggcatggcaggccgggcaagtcgaactgatccaaatctcagggcagatcaccgacaacctcatcagctggctggccatccaccccgagaaggcagcatgaccgcaaacacaggaagaaacaacgcaggcgaagaaatcctcgtcttcctcgttgtcggcatcggagggatagccctactgaacaagatggtccccaagatcattggcaatctcggagcatggcttcgcgcccacggattgctcgacgctcccgggcagggcttgtttgatcttggttcgttgggatcagttagtgctgcccacctgatgatcgccgttggtgtgctgatcattgtgggcgcagtgggggcacggttcactggtcgcagggatcagtcgaggatgtaaacgatggggcaaaccgaggtattggtcacagaatcgttgtggcgcggccgcgggtgagatgggggcggcaagcagttgccagttaaggcctgtttagttgacttaagcacactatagtgggtggtatgaatctcaaggagtgggcaggagtgcgcgggatttcgtatcagaccgcgctgcggtggtatcaccgtgggcttatgcctgttcccgtgcatcgagtgggaaggctcgtgcttgttgattgtgacgagcatgggttgccgttcgagggatcgacctttgagccgacgaaaacgatcatttatgctcgggtgtcctcggcggatcagaaatccgatcttgataggcagatcgctcgagtcatgacatgggcgagcgcgaaggaattgtcggttgatggtgttgtcaccgaggttggttccggtctcgatgggcatcggaagaagttcgagaaattgttgaaggatggttctgtcaggacgattcttgtggaacatcgcgatcgattctgccgattcgggtcggaatatattgaagcggcgctctcggcacagaatcgtcgtctccttgtcgttgacgacaaggagatcgaagacgatcttgtgcaggatatgacagatgtgctcacgtccatgtgtgcgagattgtacggaaagagatcggcgaaacatcgcgcccgaaaggccgtggaaactgtcatgatcactgacggtgaagaatccgttaaggatgatcacgcatgatcactgagcccgcggccccgaaactgggcaggaatgatccagatgttgttgtccggtcctacaagtttgcgttgaaacccacgacgtcgcaggaacggaaattgcgtcagcatacgggtgcagcaaggtttgtctacaattatctcatttcccagtggcgcgacgacattcacactcgtatcgaagaaaaagaacgtggtgttcctgaggatggattgacgccgttcacgtttaagttgtctgcctatgatatgcgcaattactggaatcgcaccaagggtgagtgtgctccgtggtggccagaagtgtcgaaggagatcggcaatgatgcggcacgtcgtgcccatgattccattgagaactggcatgactccaggggcgggaagcgcaagggtagaagagtgggcttcccccggttccacaagcgcggatgccatgaatcgtgtacgttctcgaccgggacgatccgtgtcaatcctgatcgtcactcggtggcactgccccgaatcggaaccataaagactcgcgaaaatacgcgcgaattgcaacgtaaaatcgccaaaggtacggcaaggatcactcaggccacgatctctcgcgggttcaattattggcacgtctccttcaccgtgtatgaaaagaaacacattcccgaaacccacgcacattccggctctgttgccggggtggacatgggtgtgggagatcacgtcatcgttgcggcaaccccaaacggtgatgaaatcatgcgtaggggattgccgcaatcggtcaagaaggatgaagcgcgagtgcggcaccttcagcgcaaactgtcgcgtaagcatggcccggataagaggacgaaaaccacgccctcgaatcggtggattcgcgcgaacaaccaggttcgcaagtatcgcaataccatggcgaacgtacgtcgcgatcttgccgcgaaggctgctcatgggttggcgacgaattatgagaccgtcgtcatcgaggacttgaacgttcaagccatgatgacgcgcggaggcgcacacaaacgtggtctgaatcgtgcgatagcgcaggcctcgtttgctgatcttcgacggagaatcacctacaaaacgaggtggaatggcggtagaaccgtcattgccgatcggtggttcccatcatcgaaaacgtgttcggaatgtggagaagtgaaatccaagctctccttgtccgagcgtgaatacatctgccatcgttgtggtgttgtcgtggacagagacctcaatgctgcaacgaatctggcgaaattagcggcaccgaaatccggtgtcgattttcacggaaccgggagttcgccggggatgggacgtggaggctcggggaagaccagctcaccctcgggtgagctggcaccggccggtgaagcgtcaatggcccgaaaggacctgagcggccgcaaggccggcacgagataacctgaccatcagagtcagttctcatgcaacggtcagtgggcgatggctaggccgatgagggcgccgctgcacaggctgggtgcccaggggaggaatcgggtggtgtggtgtcggaaccgatcgattagggcatatagggcgatcagggtgaggccggctatgaccgtggcgtggatcgtgtcgatgccggttgctgcgaccggggctgcccacagtggtgtgatgcgcacgtcggagaagccgaagccgcctcgggagatgagccaggcgatcatccacgctgcgaagatgatggtggtagcgatgacagcacgtgttgccgcagtctggtccgagagggcggtaacggctacagccccgatccatccggcccatccggtccacgctagggctgccggtatccatgtggtgatggcgtcaatgacggcaacccatgccccgatggtggctagcagggcccacgtcggccacgtgggtgctggggcccacattgtggcggcgatcatggtgaccgcagccgcggcacagaccgcgatcaagcttcggagactgtaggtgtcgcggtaggcgattttgtcgggggtggcggtggccggttcgggcaggatgcgagtgagggagggccatcctgcggtcgcaatggtcacgacggcggcgatccacacgatctggtgcatgggtctcatcatggcccaatatcgatgggtgtgggtggccgacatggggtcagtcgtcgagaggtttgcgggcggttgtggcttcttgggtgccgaggatgagggtgccggagtcgtcgccggctgattcccagtcgacgatgacctggtcgccgtcaacgctggattcggcgatggtcacccattgcccgtccatgtcgatgagcatcccggcggccagctctgtggcggcaaccgggtggggtgggctgtagaggaggtcgatgtcgcgggcagggtcgtcgggttcttcggttacctcaggtggggtcgatctggctgtctcggtgtcgtcggccaggtcggctcccaggatgcgttcccattcggggctggttttcttgcccgctgaggccatcgtctcgtcgatctgttcgtcagtgggccacacaaatttctttttggtccaggtcgtggtgtcgggtcgcagctgatccagcagttccaggtcttgcggggagtgggccttgcgggggtcgggggtgtagaagaattggacttccttgggggctgattcgccggataggtaggtgcctcggccgcgtttgccgaacgggatgcccacgccgacgtgttcggagccgaacatcatgcgggctccgtcagcggacaggggtccggtggcggcacgcccggagaagttgtctcggatttcgccacccaggaactcggcgtcggggcgttgggtccccagatcgacgtggatacggcaggcggctgccatgcgcagcagggagccgatccagccgaaaacggggcattctccgggcatcccagagaccttgatcgttgaccaccagtttttcgcgttgccgtagaactggcggtactcgtcgatgaggaccagcacgcgggtgaagtcggtctcgcgggccccttcttcttcgatgcggcggtagcggtcctccatgagagaccacagccagtggatgagggcgacctggtcggggacggtagtggcgaccatctcgatgttgggccactcccgcaggcccaggtactcgatgcgtttagggtcgatgacgaagacgcgccagttgcggcgggcaccctcgacggcgtcgccgatcatggacaccgtttttccggtacgggtgcggccggccttgagctggtgggccatgacaccggagatgtcccagaaacaggtgttgccgtcctcgtcgacggcctgggggattttctcccagtctggggagtctgggcccggaagggccacgggtcggggcaccatcgagggcagggggtggcggcgggtgacggtgatggtgtcgtgttccaggtcgaagtcgctgcgccactggccgagcatcatcgccgaggtcaccgcggccaggcgcaattggatgttcgggctggacaaatgggcgccacgttggtggtgaatggtgaagccgtccaggttcccccgatcggttttccaggaatcgacggtgaccgccgacccatagatctgagtggctacttctttagcccgttccttgtctcggtccagatcggttttgtcagggtcaggggtcggggcgcggtattgcaggacgaaccggccggccgggatcgttgcggatgtcaccgtgaactctgccggcgaccaggcagccgcggccgcctgggtgagggccattggcatggtctcgacggcagcctcctcgggggggatggtgagggtcaggcgtcgcggatgcgtcttcttgcgattccatgtgactttctgcctcaccggcaccttcgccgccgactgaatggctaggcgagctgattcggcagtttcggtacgccggccagcgcgtagcgcccgtcgtgcgtgaaggctgcccaccacagcacagcccatacacggcagccaccagcgcggatcagcggctgctgcatagcccccggtagctagtaccgcacctgaccagccggccgcgatacttttccacgccggtttcgcgccaccaggaccagcgttatggacggtctgcttcgaggctgcggagggacgagacagcggagtgctggtcatgccgcggcctccttgtggcaggtcatttcacaggcatgccggccagcgatgatgccgtggcgcaccgccccggtagccgcatagaccgcgcacaactcaaacacggggcacccatcgcaggccgccgggttcatgctttctttgtcccacgatggtgggtcatcggtgcacggcacggccaggccatcctgttgagcggcgctgatagcggtgaataggcgcagctgggcgcgaacttggtctggggtcaggttgacggtgcgggctacacgcatggggttccttcctcttcaccagtgaaggttccctagacccggccgatgtgcggagggatttcagtgttttatcgaggtgaccagccatccggtctgcgctgcgggttcaggtaccagggtcagatgcagcatggtgtggtcggctaggggcacggcgaccaggggcccgtcggcgctcgccccggtgagggtgggagttccggccacggtggtggcgggaatctggttgggtttcgcggccatcagggagcccatgagggtcggggcggcgatctggacgagggcgactttgcgggcggcgggatcgcgggtcaaccagccgcgggtgaaggtgagcgcagccgacgtgatatcggggctcagcggggctggtgtggcggctgggtgggccgttgaggagggccatacgcgcggtagcgatggcgacatcgagcgggtcggagtggggtcaggtgtggggcttagggtccgatgtggcgatggggctaccgccccggtggtgggagacgagactggttgggggtggtgttgagggcgtgggatcagggtgaaggcagccaaactggccgggatgaggatgacggccgcgccgacacttcggagcgaggtcatgtgacgatccttcggtagctcgacgggttgccgtagatcttttccacgttgatgccactatgtgggttgtcggcgctaaccatttggcctccaccgatgtagacggccacgtggtgggcagggcttccccagaggatgaggtcgccgactttgagctggtcacgggccacagcagtgccgactttctgctggtcggcggcggtgcgagggaggctaatgccgatacgccggtacagcgccgaggtcaggcctgagcagtcgtagccgccatcggctttgccgttgccaccccacacgtaggcgtaggagttgttgtcggcgatcgatttggcccatgccacggcttcggccaggttcttcgacacaccggtctcgttagcggccccggtggcacagttgtttgacaggtgccctgtagtagtggatcccactatttgtttggccatggtttcccatttggcgtaggcatcgggcagggctgagccttgcactgcctgagctgcctgcgtcagcggcatcttctgccagtcagcgatgtcgactaaaccgggaatgtggaatccagggccgccggccgatccggggccagcgtaggtgatggtgtggcctttcaagaacgcctcggtggcgtaggcatcattgttgacctgatccagagtcccgtaccagcccggcaggatgcgctgctgaaaggggccggcgtcaccgtcaccgttagccttcgctgaggtagggtcggccccaagatctgattcttgtttggcggtcatgatagcgatgaccgctgcctgggtaggcagtttgtcacgctggaccacagtgacgatggtggtcacgagctgcttctgcctggccgtgaggcctccggcacccacagtgcctccggtgacggtacccacgcaagcatccccgccgacactgccaccgccgccgccagagttgtcgtcgagggccccagagcctactgacagcagcggcacaatgatcacggtcgctggcaagaccgccaggcccgccagcatcagcactgctgcactcaccacggcgatcacgtgagatgctttcaacgctgcccacctctcgctggtttgagggggcgacgcctgctggtacgcacaggcttggttgatccagtccgccgttgattggcaggcctgggtttgatcggcttgctgggacccggtttgggctccggagtcttaggctccggcttcacatgcctaggcacttcggctgcggtgggaggagtcagcacgtggcgtaccggcttggtgaccttctgggcacccgaaacaaccggcttagacaccaccttggcacctttgaccaccggtgcggctgccttcgcgccggccttcttgactgcacgatgcgctttgatagccccggcctcggcccggccaaccctactagcagtagcatcgagggctctgtgacccgtcgttgccctcaccggtgcatccttgccctgacgggcctgcttcgcgatcatcgacataccgccccgcaacgccgaaacacggttgtgagcgtgggcgacggccgacataccagctgtcgtaattttcgactggccctgcggagctcctcccccggtacggatctgacgatatgacgccgaagcacgccgcgccgccgaggccattcgcgccatcttcgcagcccgggtcactcccaccgacgcgccaccggtgactaccgcagccgcagccgaaaccatccgccttcgacccaatccagtgagcttgcgaccaccgctgcgcaccatccggcgagcaccccgcccagcccactggccaatcgccgacgccccttcagagcgcttactacgcatccagtcgttgatcttggccctcagcccctcctcacccttgtgactacgccacagagacaccaagaatccgatgattcccacgatttccaacatgttgacgaccatgaccttgatgacaacgttgccatcagaggcgaagaccgacttgatgacgagcatgaccacgcccagcatcaccatcgacccaacaatgccgatcatcgagtacaagatcgaacacagatcccggataagcgggtctgtgcgaccaggaatagcccgcagcacgttgagcatcgacatgaacgccgaccacaccaacttgcacacgtagaaccagcacatgcccgcgaacaccagcaggattgctgccaaacccgtcaccgttgacgagtaaaagaagaaccccaccaaccaggaaccgtccgcaatatcgccggcgtaatccgataatccctcgtcacaatcaccgaggtcgtcgcgtgcatccgagatatcgtcgtaaggaccacctttgagcacctcgatgtacttgtcgtgacatttggaatcaataatgcggccgtagttgagttgctgatgaaccggcgccacgaacgagtccacaatgatcgcagacagcttcggagccttcgagtctcccgtcgaggtcatgtcatcaggaacctcaacctcaccagcggtcgccgtcccaggatcaaccgaactggtaatcatatgagacagcgccacaccgaactgctgggtgcgagccagcggagtagccaacgtcgtcgtatcacctgcaaaattcgccaccggggccgccaagaaacccaacgccagcgccgcagcaatcgccgcacgcgcacccgtagcccacgcccctgccgtacgtcccctcatcatcttgacgaccacgcccacaccggcgcacgtcgtcagcaacgtcaacaccgttccaccccagctgtccgctcccagcggggccaaaaccttgtcgtggatatcgttctgcaaccccaccagcggtccggtaatccacccgacccagctcatcgccacggtccagtccaacaaccggcacaacagggcaatgaccatcaggtacgtgttccaacacatgccaataatggaggcccacatactcttcagcggggccgtaacgccaccatcgtccatcgacatctggtactgaaacaagtgaataccgttggagtcagtcacattgaaaccgtcacccatccagcccagcccaggacccgacgccatggcaggcacactgctcagcgccaccaccagaaccagcgtggtgacgatgatacggaaccaccgctccccggttccgggacggcgtggatgacggctcacgctgcctcctggtcgtgctcgggcgggttggagctggcggcttcgcggtggggagcgtaggcaggtctcagtagtcgaatttcaccgacgttgccgtgctgatcggcgtacaggccacaaccgggacctccggggttgagggcaatcttgaccaggtcagcgaactcttcaggggacgttttagggtcaacgcccaggaactcgacacctttctgggcgaggttgatgttgtcgcacagcaacacgatgcgatgctgaatgaggttacggacggtctcgttggggtaatcggcctcggggtcgtgggagccagtaatgagccaggcgttggctcggcgggactcacgcacgtactcgtcgatggcgtgggaggcctccggcgaggacgacatatggtggaactcgtcaacgatgaaagcggcgtcgcgggcccggtcgctaaagcacaccaggcgagccagacgagcaatgagcgcgtagagagcccggccaaacaccttgtgcgggggcagctgacgaaacaaatgttctgacagcatctcctcggcgttaggaagagcgatgccacaagtgccaatgatgaggatgtcggcgctcaggtcggcgggaggaaggtccgggtcaaagatggccgacgctagggaggccgagttctcgatgtcagcgaacacggcaatcctgtcagcgatcgcggtggcctcgggaaggtcgcattcctcggccaggtggcgggccaaacgcccacacgaggtgatctggtggtcacgcatgtaggccggtttgaggaccttggccagcgtggtcccggccacaccgatggtctccaagttaagcaaggtcagcaagaacgactgggcgacctgcccggccatctccggaggaaggatgcgcagcgggtccagcgacagcttggggtgggccgtgtcgacgatctggcgtctaaccccgtcgatagagttgacaaaggttacccactcccgctcatcggagttgtcggtggcaataatgcgcccgccccgggccgcgatggctgcgcacagccgcttctcggccatcgtcttgcccgcgcccatcttgccgatgaacgccaccgtgttgcctttctgatcctgagtgtcggcatgcaaatcgaggtaggccagcgactgcaacggggagcctgtgaccacagccaacgggatgccggtggtacggcccaaccggtactcgaccaccgggatagatgcggcgaacgcggaggcgtgagtcagctgacggtaggcgcgaagcgaggaggagaaccggccaccgggccgggcagcccacagcaagtcctcctgacggcccacgggacgcacccacgtgaagtcaccgaacaccggatcattgacgaacgctcctgccagctcctcggtggtctcaaagtcaggagacgagacagtgacggtgataagagcctggatctcgacctcacgctcatcggcggccagctcggcgttgtagtcgacgagcacctgagcggaatgctcgatagacatgagggtcgaagcctgggtcatctcaccgccctcgacgttgtcgagctggtcgacggtttggcggatggcccgctgatttttctgcatcgcagcgtgacgggtccgggccactccccggatcgccacgtcgaccggcacgccagtgtcgtcgatacggcccaggaactcgtaggcaggccacgtcatcgtgcggggcaccttgcccagcgcaatgtgggactggtagacggtctcgccggtgtcggcaccgattttgaggacgcgacgattccacgcctgagccgtccgggacatgtgggagactcgcttgtcatcctcgctggccagcaggtcggaggtcgcggcctcatcgatgaccaactcccccagcgcggcacgtccaacctcatccatgagggcgattccctcgccaggggcatcatcacgcaaccgggtcgggtggcctgacaggtgctgccgaagccagatctgttcatcaacggtgaccgggcggggttggaacgctgccggcagtttcgcaccgaattccttagcctgacggagggcccactcccgtgcgacacggccaggagcggtggtcatgagtccggcggcttcggtgattttgttgagggcggcggtccaggcggtgtgggtgcgtattttctggtcttggttgagtttgatcgataggaaccacacgcgccggcctagggattcggtttcaggctggtcgagggtggcgtcgatttcgtcggcccacacggggtgttcgctcaggtcgaggccggcggccatggcgtcgacgatttctgcggggtcggtccaggtgagggctccgttgaggcagaactcgtggcgggcgaggtggcggaataggtcgcggtgagctgcggcgacggtgagggaggcgttctcggtgacgggtcgctggaggggagtgagtcgccaagtggcccagatgtcgccggtggaggtccagacgaggttgtcgaagaggaaccgttcggggatggacatcatgactccttttcggcggcggcgaggaaggcttccaggccgctgcggcgtacagcgttcccggtagggtgcaggggttttctgggggtgggttcaggtttcgggtctgggaggggtttgggctcgtaggtggtgtcgatgtcttcggcgaggacgtggtcgagcaggcaggtggccggggtgtcggtagtctcgtccagctcgtcgatcatctcgtcgaggaggttgggggtggtggatgcggcccacacaggtgggatagccggtgcgggtcgaggcggtgtggggaggcggagtttggtttggccccagaggggtgtgtgggtcatgccggcgggagtggtggcggcgtgagtggtcacgcgccaccagcccgccagccatgccagaggtgaccaggtccagtcgatgcggccgatgatgaactgggcgagccatccggcggccagcgcgaagatgaaaccgcggatggtcatgcccccgtcgataattttgaagcccatcatcgcggcaggaactacgccgccgacagcgagcacctgatagatcgtgtaaggcccgccggggatctttcgacccgaagagtccttgccgatgatgcggggctgctggcgggcttcggtgtgccactggatgtccatgacttgcttccgggttctcggctctaccgggcgggagcctcaatagcggcctttgtgtgctggggaatgtccatgtcagcccttgcccagtccctgcatcatctgtccgaagaattggatggcgttgccttggatgagccagtacgccatgccacagacgaacagcatggagacgattttcgcgaggctcatgccgtgtcggaagatgttgaacgcggcgagggccatgactgcgagcatggcgacggctcgcactgcggagtttccttcacctgccttagttgtggtccattcgaagaggttctgcgattccagtggcagcaggaggaattgatcgagcatgagaggttttcctttcaggaagccgaccgggatggtcccggtactgacgggctgggcgacacgggtgtgccgtccggaggcagaaggcgtgacggctggtcgagggaggcaacctcccagcggcctgcacgactgacaagagtcaggccgtactggctagtccgggtagtggattcgtcaccggttagctggcatgtcacggtcgcggtgacagcgatcttctgccgatctgagggggtggggatctcgtcaggccccaccacatgagtggttttcaccgatacacacggggctgggtcaatcgccgtgaaagcggtccccgggctactccatctcgacaggtcgtcgctgccactcagcatcgcggccaagaaacccgaagaggtctgggcagccgggtcagcaggacgaatctccgaggagtccacgtcgggggctgaggccggtgcaggcatggggatctgcccaggcaagcgaagagcgatagctttgccgccggcatcgacgtggaccggaaccgaccaggcctgtccgctcccggattggccgcccatggtgatcactgtgacctgccacaggctcggatcagacggggagacggtagcgtcataggcggtgacggtggtgggcgctggaccaggtttgcggggcaaccgagcatcggtgatcttggacgccactaagtggcccagattgtctaggctctcagagtcagatgtcagcagcagagtcgtcacttcgactgcggtagctgaagctatctgagctgtgcggcgatcgtgatgggtggtatcagcgctgacagctgtagcgggggcatgcgaagggaccgccgaacggatcagagcgacaggaccacacgcgaccccgcacagcactaaagcgaggaagcccttagtggacactgatccggcgtggggccaggggctagcttcttcttgtgtctgcttcttcttggccaaccagcgacggcgaggcctggggttagcggattcgccttctgagttgtgtgctcgtcccagtcgcataggtcacctccttcattcactgcatgaagggatggggcgggtggccgatgtgcggtcaagtgcgaaaaaagttcaaattttttcgcgggctgtcacaaccacgattacagcggggttggtagcaggtttcacgacaccgcaggtatgtgagcctcacaaggggaacccctgagatacagaaacccagcaagttaagcgagtcgggcccaggcgggacggtcgagtgttgacgagaggtaggcgactcaggctggtggcttgccacgccgccagctccgtctggatgctgccacgaatgcgcgcctcgatgtcatggcggctgagactggacgcagtgcttccgacattatgcgcaccgccctcgtcaattatctcgacgttgccagctgagttcgggcatcccagacagtgggggcagaccaacggatcgcccccacgtacgcgtggcgagccgttatcgtcgccacactcggacggtgtcggtggtctttaggggtgccccttcgggtcccttgaggtagctgttgatccatcggggccggtgggagtgatcactggggtggtattgctggcgccagtggccgcgcacgaggaatcgcgtgtgaaggcggcgtcctgtcccgtcgcggtcggtggcgggttgggtgcgcagaggtcgcagatcgacgattgtcactggtgaggtcgactcaccggtacgggtggcccgctgcacgtcgcggcgcgactggtcgcggcggcggcgttcggcgacttgcggctgggccatgagggtccaggtggcccccacgagcgccatgaccgcgccgacctcggggcacgcgggggcgtaagcaccggaagtaccgtctccgtcgaggggcacactcacgacgtttccgacacgcaccgacgtggcctggtcgtcgaggacgaggatgacttggagctgggcgccgatgacgccccacaagacaccgcgcagtggctggcgaactgtcaagggtgctgccgcactcgcctggtaggccgtcaggcaagtgactggcggcagtggtccggcccacatgagtaggccggtcgggcacggtagggctgccgcgacggtccaggcgggcatatcagtcgacgcgtcaagggccagcgcggtcatgtcacggctgacccagtacaagtcagcttggcggactcgcgtagaccattgcggcgtaccgggcggggctggatgacctcgccgtgtcatgtcagcatcgagggcctccacctcggcggccatggccgccctgcacgctggcatatccttgccctgttcgattcttctcgtcatggttctgtcttctgcccggggctgcttcgatacccctatcatggacacatgataaccgcaatgccaacaattacggggtttcttgacttttttgcacccgattggagaggatcggcggactggaaaatcgctgtcgaatggcgcgctttcggggccgcgaatgaatagttcaatccattgcagccgccgcaattttcgaccctgtccgtaggactcatggatccaatgtccccgcacgatgtgcggggtcatcaggtggcgacccaagggcgaaagcaatagcgattatgcggacagtttggcaccgcgtagatcagcgccggtcaggttagcgttggacagatcaacgtcgtgcaggctaacgccgcgtagatctacgcggcgttaggcaggtcagcacgccacaggctagcgtcgcgtaggttggtaccgtacagtatgacactgcatagatcgacatcgtgtaggtcaacgctggacaaattgatactgaataggctaacgccgcatagatcggctcgcgtgttatttttatgcgccgccgcgacaattgcgagcacttcttcgcgattcataattcctccatatggtctaatttttgttggcgtcatttcgcctttgtcgtcacggtagtggtgacacctgggcggaacctccatgtcgacatgttcatagtagatatgctgtggcgtctattttatggtggattccttatttctgggcgaggtagttgtagatggtttgtcgggtggtggatagggcgcgggcggtgtcggtgatggtgtggcctgcactggtgaggtggcgggcgaggacctggtaggcggctctgcgagcggtttcgtgggtgtcggggattcctgtggtgaggggtcctagccagtcggcggcggcagtggcggcgcgtggaccccagacgtgccaccaggcgtcgacggcgggctcgacccacagtccgcggcgtaggaaggcatcggtgttgagggcttcgacgaggtgggcggcgccggcgaggtaattgcgggcagggttatggatggcgtgggcgatagctacggcgaggcgggcgaggtcgtcgtcttcgacgactgcgcgcaggattgcgagggaggcgtggacgtctccggtgcggatgtctgtgtcggtgatcgcggtgagggcgtggacatagagggggggttcggggttatcagcccaggcggcttggatcgcgccgatggcggcgcgtacgaggtgatggcgggctgcgtcgaggtcggtggactccatgaccacatcggtgaggatcgtggatagcgtgctggtcttgtcggtgaggatggctgcctctggccgatcggacgtgagtgcggtctggaaacgctgaggatcgaagaattcgaccatcgttagcatcgtggcgcggttgacccaggcggctagtggagggcctgagagtggatcagtggtggcggcatagtacgccagtcgctgctgggatgtcatggagtgtcctttcagtgtcataccgttcgggggcattgctcgcttctattatagacatatatttccccttagtgtcaacaatgacgatcccgtgtgggacgtcaggttttcagggtgctcgggtggcgggcatgtcagtgcgggacaccgctgctgcagtgaagttcttgtctgggccaccggtgaggcgcgagtcctttagcattactggcggctagttgctgcgcccatggatgggcgcactatcaggccgtggtcacatccactattgggcccgcgcgaatcaggtggtgattgctcacaggctggagtgaatgatggctcatccaggtgagacggtagctgcggtggtatgccacgcgtgcgacaacgctaggtgccagaatccgtcacatttggtggccggtaccgtgactcgcaatcggcgggagtacgtgagacgagcaggagctccaggaacaccgttaaatgacgtgcatggcccgcggggtgggcgaaattgtccaagacatcgttggcgtggaagtcgtgacggtgaacggtgccgggctagtgctcatgactgccgttcttgctaaatacgtcccgtacagaaacttttatcacgtggccggagctgtagttgtgtacgcgtgtcttgccgctgcggcggcagtgccgttttggtacatcgtcggcgtaagcggtacccaactgctcatccggcaactgatcatgtaggacgcagcgcacggcgtgccgaattaccgacgttggtcggcgcggtgtttatcggaaggctagcttcatccgcgacgcgagacatctcacgtagctcgcggcgacaatggtgacctaatcactgtggagccggtatcgctcgatgatctgcgtggaaactggacggccgaccgcgggtatctcgtcggcgatggggtggcgccgacaatcgccagtctgcagctgatctgaggtcataatcctttatctatgtcgtagcgcctgggaggcactccccagggtcgtcgtgtgtgcggaggtagggccgaaggctttggcgagataggcgacggccccccaacgctgctcgatagtgacgactcgacgactggtcgatcaactagtgtgggccggtctcccggcccacactgtgatgatcaatcggtcagactcgacgcgtcgccgcgtataggtctgtccccgaaatatcgtcgaggatccggtcaccgaagtatcgcagcgtaatttctgatgctacgtcggacagtaaccccatcgtgacttttacgacattccgacgccgtgctgacgccgacagtccccctaggctgaattgcgtcgtcccaagccactgccagtcgtcaatccacagaccgtcgccacgggtgtcggtgtggaactcggcatgggctgggacgactgtgccatcgccgagctggtagtacgagtcgacagtccacgctaggcgacccgcctcatcgcggtggatccggccgatggtgatccgatccaggtcatcagtgctaatctcggtcatgtcagaggtcctttctctgtcacgccctcggggagttgccgctcctgcgggggcttcctttgttttgatacctctattatagacacacagattcgatgatgtcaacaaatatcggggaaattcttggcttttttctgcgactttcgctgcggccggtcactgtgtcacctcgtcgatcgcggcgagggtagcttgcgtgagcgccccccagtttgctcggtacgtggtgcacgccggtcgtgccgagaagatcatatccagccccacgcggatcgtcgcacatgtcatcccagtcgtagttgctgtcgtattcgctgatatgggtccatgtcgtgacagtgaagccggtcctcatgacccgcacccacctcctgccggcaccgctccacggcacagccaccccactgactgtagtcgaggcggcatcaatccccaccaacatcgacttcgagaccatagaggcccggaaggtgcagcccggcggaggcatggcccacctgtcagcagaccgagcccgcccgatcctccaggttgcctcctggctgagcgcggcctggatactcatggccacccccaccgtggccgagcccagctcgacatgcgactcatgcgccaggttcacgccgtcactgacccgaccggccgacggctgacgaccgcgcacaatatgcctggtcgttttaggttgattacagctcccccgagctcaggtgacagggcgtttggctaaggcgttcacggcatcgctgatgatttgtttgagggtggtcccgggatgggtggctttctgatgggttagccattggtcaatgtcggcgggcagctggaaagagcgtggctgaccgggggtgcgcacggtgtgggttccgaagccgttaagggcggccgggggttgttccatatcggcggccacggctagagcatggccgatgatcgcagcgatgctatgcgaggggtggtcggcctgccatccggccaggagggattcagcgtcgtcggtgagagtgacaccgcgctggcgacggtcggttcctagatctagggcgggcagggtttctatgacggggttgtcgagccaggcacgtagcgcggcgtggacagtggcggtcatggtgccggagaccctttccagggcggtgtcgatcttgggatccaagcgcacctgaacggatccggggccctcggggagtttcccggccggtcctccgcggcgaggttggacggtgtcagccccggccacgcccagatgacggcgtagcgcagcccgcacgatggttgccttggggacgccgagttcctgggcggccgacgctagagagcgatggaggtcggcgggcaggtggaagaccctgggggtcgggtgggtgcgtttgttgctggggctctttgtcggctcggcggtgatcgggtgagcggtgacgtagtcgtcaatgaggcatacggccaggcggtaggggcgaattccggtggtctcggccatctcatcgagggcgtcacgcatatccggggtgacggtgagcatgactgagactcctccagtgcgggatgctctggcagctcggccacgggttgaggaggggatggtgtcggggatgcccagggcctgcgatagcgcggtgcggcacacggcggcgcgggagactccgcgataggtgacgagggcgtcgagggccagggcgagggtgtcggggatgcgcaatgccagtcccgggttggtggcgtgggggcctttgggtgccatcggttcggtattggcggggtgggcagccaggtagtcggcgaggatgtgagcggccacttcagagcgactggtgtgggcggtggcagcgcggtcagccagagcggcacgtatctcgggagtgatagatagccctagctggaacgtggccccggtgtgcggggccggcgtggctccacgtcggtaacccgcgctgatcgtgtcgggtagatggaaggtttcagccagggcggttcgagcaaccgccgccagggccacattgcgcctatctgctagcgcgtcgagggtggggcctagctcgggcagatggaggggttgcggacggtcatgatggggtttcctttggtacgattgaaactgagcgcgatgcttatcgtgttcgatctgatgtgtgggtcctcgccgagtagcgagggcccacactgtgttgttgtcggtttataggtcaaggtggggtattccacacaatccgagagtcgtggttggcggcagcgttgtcgaccacgtcgaggatgtctgcagcagacgtcgtgatggtcagctgccggtctctgatggttttgtgagcagtggcttaggtggagttgccagcgtcgactagacacacgtcgatgtcaggagatagtgacgtggccaccacgttcagcttatgttaagcctagacattaacaccacggtggacaagtcctgccgtttccccttggggggctcatgctgatctggttgtccgctgtcttctcactagatgtgtgctggtttttctgctcaccggtacacactgctcattgctagacgtcgtgtctatgacatggctgggcgtctagcagacgagttgacatcacccttaggctggcagcgttcgaggccgcaggccagagaaagcggacagcctaacgattgacgtccccctctattcttctctcccgcctcccctccccccgtcccctgaaagccgctcttcatctagcgttcccccgccgccgacaccttcctcttttactcaggttgagtcgaccatccatagatagatacatatgcatcggtgtatcgatctatcgatgtatctgggtctggttttaggaggagacgctcccagctacccctagagccaggcccctgctttaagcgtgctgccaggtaatgcccccggtttggcgagcggtcacccacacaagggctgggctggttgctactcccgccagggatagcggacatcctctatacacgtctgtcagtccatctttttcgtcgtatttccccttgtcagagcgttcttctcaaagtgacaacgctagtggccttgacgacaacgtcctcgacaacctcatggcggtggtctgtgtcttgtcagatcaaccacaccgggaaagagacaccgccgatgttcaccaccacagccaccctcaacgatgaatgggaccagatccgcaccattgagatcgattggcacgactgcgctgagctgatgcactgcatcgacgttgaggatgtgctggccgtcattcctgccgcccccgacgccatcttgggctacctcattgcccgggctcagggcggtgatgagttggctactcgcaccgtcatccaagcgtttgtcggcaagctcattctaatggccactgccacgaagctgcgtcgcactaataacggtttcgatgatctgttggcgggtctgtgggagacgatcatcacctatccgttggatcgacgtcctgacaagatcgccgcgaacctcgtcctcgatacgttgcaccgagttgtgaagttctggcgtgccgattcccccgatgaggaagacgctcacggattggtgcccttccccgatactcttatcgcccccgagcccgatgaggacgtcaccgcatcccaggctattgccctggctgctgaccgtcattggatcaccgaggacctggcccgcctcatgaggcacatctactgcgacggcatgaccggagttgatgcagcccgtctgcatggttgcgctccggccacggtgcgttctcggtgtcgtgacgggcgggctgcgctacaacgcaatgccgaggagatcctggctgtctgctgatctttccctcggctcgcagccgcctccaccgatggtgcaagctagagatctagcatctcatatagttgtctagctagctagattgatagcaatttttctagctacatctctagcacatggtatagcggaattacggctggatcgctagctcaatggcatgcttgccgatggaaggtgtgtcgacctcccaaaaagctggaaggagctttaccgtgcagggcatgaccagtcccattgaccgatccccgttcgaccgcaccatcgcggtatggaaccacaagggcggcactttcaagacgtccgtcgtggcgaacctgggatacctgttcgccgccggcggtaacaaggtgctgatggtcgacatggacccccaagccaacctcgacatcgacctcggtatccctgctggggaacgcgaacgaggcgtaggactagccgaggcgctgcgtgaggggaatacccttcccccaccgcagcatctcagcgagaaccttcacctgatcagtggtggcccagccctcaacgaattcaccgaccccgcctccctcgcagccatccttgagcgggtcacaaccgcacgttacgaccttctggcccaggcgctcgcaccactagcctgggactacgacctgatcttcatcgactccgggcctgctcagactctgctatcccagaccatccttggagtagcccgctacctagtcgtgcccacccgcaccgataacgcctcgatcatcggccttgttgacgtccaggacgccatcgacggggtcgccacctgcaaccccgatctgcaactactcggcgtcgtactagccggggtaggcgcccgcgccactcggatcgccgccgataaacgccacgccattgacacggtcctgggaacaggaaccgtcttcaatgcggtcatccactactccgaaaaagtggccgtactcgcacgccaacaaggcaaaaccgtcgccgagctagccgccgaataccaccacacccagcccgcctacacctacctagcccagggcaaaaaggtccccaacgtcgccaaagcggccgtcagcatcgaaaccgactacctgcggctggccaccgagatcagtgaccgcatgtgcaccgacgacgagcaggaacccactcatgactgacgacccgacctcacccacccaaacctccaccagcgacgacatgcgcctagccgaggaatgggccaatagcggccgcacggtgggggcccttccgcaccgtcaacggcctaaaggctctattccccgcaccgccgaacagccccctgtctcgtcccctgccacccacacaccagccccgaagaaaccccagacggccacaaccacccagcccggacgccagcggatcaacgtcaccgtctacgtcgtccccgcactccacgagcaactgcgctcccggtcggcggcgacgggggtgacggtttcggatctggtggtgcaggctttagcgttcgtcgccgatcacgcagccaaggctgtcgccgatgacctgcgtgtcgagacggtccctggtgatgaggctggattgttcgatgtgaccccgtcgcggccggtgggggtcgccaaaacccagttgggggtgcggatgacccgccataacaaggctggtttggaccagctgacccagatcagcggggcccgtgaccgcagccatctcgtgtccgtcgccgtgcgcgactatctcgactccaaccctgtaaagaaaggccgacatgtccgctgagactcctgctgcttccaccgagcggcgttttgatacgaccgtcaagcccaggcggcgacccttattcgtcgcggccggtatcgccattgtggtggtcggcgcgttgctcatcacccagttaatccacgcgagccagaccgagaatcgcgtgctggaggttcatgccgatgtggctcgtggcgaggtgatacgtgacaccgatctggtggcggtaaccgtcggccaggtcgacaacgtgtcgacagttcccgctgatcagctcgactcactggtcggcaaacgcgccacggcagatcttcgagccggatcactcttgcctgccggggccattggtccagccgatgtcgttccagctccgggcaagtcgctggtcgggctgaagctagccgccggacagatccctatcggagaccttgctgccgggacgaagctgcgcctgatccagacctcggcaggcgggtcatccaccaccgggcagggcgccaccaataccgatattcaatcgtgggctgcgacgatggcgtccggcaccaaaagtactgagcaggtcaccttgatcaatgtggaggtggactcgcgtgatgcagctcggatcgcccagctgacatcgcagggccgtatcgctgtggtaaaggattcgactcgatgagcacaatcgttttgaccagtgtgtcgggagccccgggggtgaccacgacagcgattgggttggggcgggtctggccacagtccagtctggttgtcgaggacgacacccatcacgcgatgttggcgggctatctgcgagctgcccagcacgccgagccgaacttggccacggtggcaaatctgacggccactccgaccaatgcccaaaccgtgtgggaatccatcgccaggcctctgcccaccgatgatccggtcagcgggctgagacgcaaggccgtcctcggcccgcccacaccgtggtctcgtgcaggtatcgacccccggtggggattcatgctggccctgtggcggcagctggccgaggccgggatcgacaccatcatcgacctgggtcgcctagccacgccgctgacgtcaacgccacatctgatcgccacacccatcatcgacgacgccgacatgatcctggtgatgatcgaggcgacgctacgcgatgtggccggcgcccacacgatgatcgaagggctggccgagcagatgaacctggccggggcccaccagcgcctcggactgttggtccaccgcggcggcgcggcccgcggggtcgctgagttcaccgacaaagagatcacgtcggcgttgcagctaccggtctgcgggtcgatagtccatgacccagtcgcggcagcccagctgtctgacggggtcgggcagcggttcgacaagtcgcgtctagcacggtcgttgtcgaaggtggcgggcgttctcgttgatgtcattggtaggcgtcgtgctgatagcaaggaggatctgtgatgaccggtttttcggacaatccgttcgacaagttgcgctcgcgtcctgatgctgaggtgtggtcggcgtcaggggccgtgcaggtaggcatgggggaggctccggcgggggaggggcccgggtttgtttcggagttattttcggcgtcggcggggtgggccagttctcagcaggtgactcaggctcccccggtgatgacccgctcggagaaggttgattggccgattgttgcggagctggccagtacggccacagacgagattgaggccgagatcacccggtggagttccacccatgatggggtagcgacgctggacattcgtcaagccatcgcagagcctgctatcgcctcggctgtggccacgtatgctgaccggcgtcagatcgatgtgggagagacctggcctgatctggtacgtcagcgctaccgcaaggctgtgtgggatcagctgttcggaatggggcggctacagccgctgttcgaaatcggcgacgccgagaacatcattgtggtgggcaaccatgaggtggttgtcgatcacaacgatggttcccggtcgacgttaccgccggtggcggactcggacagcgagttggaatcccaaattgcccgaatggcgaggaatgcgaccccgcggcgggccttcgacgccgatcacaccgatgtgacgatcatgcatgagcagaagttccgtattcacgcgatctcttcggaggtgtcgttgcagccatcggtggtgatccgccagcacttgctgacccagatcagtttgggggacctatcacagcgcgggatgatgccagtggaggtggcccggttcctggatcaggcggtgcaagctggcaagtccattgtggtcgccggtgagcagggtgcgggcaaaacgacgtttctgcgcgcgttgatccacgccattccgatgcgcgagcggttcgccaccttggagaccgatcaggagctgttcgctcacttgatgccgggccgacaagacacgctggtgttgttcgcccgtgacggtaacggcgaggtggatccggcgactggcacccagcacggtgctatcgagatcgcccagctcattccccctagtctgcgccaggcgttgacccgggtcatcgttggtgaggtgcgcggaaatgaggcctcggcgatgtttcaggctatgcagtcggggactggcactatgagcagtatccactccccgcgagcctctgaggtgccgtcccggctagcccagatgatttcgatgggtccggtctatgacctggatcaggccatgctccaaattggtcattccatcgactacatcgtcttcgtgcgcaagcgtgacctgtctgacgggacccggctgcggttcgtcgagcagatccgttcggtttcacctggcgattcgacgactcccagtcttggcgaggtgtatacggccgattcgtggacaggtcagccgttaaccccgcttatgcctggttcagcggccgatgagttgtctcatttcgcccgcgacttggattattgcgaggcccactcatgaacgcacctgcactgaccagcgccctcatcgtgaccgggttggggctgatcttggttatcgacggtctagtgccctcaacgcctcgtcctggagccgcgctaagcccggcccagaggtgggccaggctcacccaccgtcccgctggtgcggccgggcgtcgccgggatttgcgttgggggttggctgttcttgtcggtgtcgtgttgtttgtgctcaccgggtgggtggctgcgctggcgttgggccccattattgcgctgctggcccccaccttgctgggggcggccccaccgaccgatattccgctcatggaggcgctggatcggtgggtgaggcaggtggctgcggtgctaccccaggggcgcgacatcatcacagcggtgcggatctcgaggccgcgggctccgaaaatgattgccgagtcggtggaccagttggtgtctcggctggacggacggatggagccgcgcgaggcatttcagaggatggccgacaagctggactcggctgaggctgacgcggtgctggcctctctggcgttggcggccactcatccgcggggtgcctcgacgacattgaaggctattgctggcaacattcagcagcggttaaaagtgctgcggcaggtggaggctgagcggtctaagccgcgcaattcggtgcgtcagatcacgctggttacgatcgccatgttcggggcgctgctggttattgggcgggcgttcctggccccattggcaacccctcctggtcagatcctggtagccgtggcggtggtcatgtatgtcaccgcattagtgcagatgtatcggatggcgcgcccgcggcaccgcacgcggatcatggttaggaggagtcgatgacgacgactgcgttgtccctgctggccggggctattgtcaccgtcgggttgttggtcatcgtggcagcgttccggcctgccccaggccctgatctagtagccgccttggacgtggtatcgggtcgcacctcggcccttgacgagcaggtctaccagacccgggtcgggcgtttaggtcgcagcgtgacccgcacgttccatgtgtcggtgtcgccggcgatgcgagccgcgctgcggttgcagggcgctacccccgaggcgttctacgggcgtcgtttgatttgggcgttatgtggggcgatcctgccatggctactcaacgcggtggctatcgcggtgggggtgaatttcccgggcttgctcatccctgcggcgctgtgtgtggcgctggctggagctgggtggatgctgccggcggcacggttgagggctgcggccggacccaccaacgatgactcgttcgaggcgctgctggtgtttatcgacttggtcgtgttggaaaggctcgccaacgagacctccgtcgacgcgctcaccaacgcggcgaacatgtcagatgccccactgttcgtccagatccgtcaggtcctcaaccgtgccgccctggaaaacgtcgacccgtggaacggactcgaccggctcgctgacgacattaagctgcccgaactcaccgatgtggtctccatcgcccgcctccaggaggaaggcgcttccttagtcgatagtttccgggcccgggtcgccgagttgcgcgacgcctacttgctgcgcttgcagcaagagtccaccacgatcacccagcgccttggcctgtggacgatcctgcaagccggatcggtcatgctcatcttgatgggggcggccgcgctcacactgattacagccggataaaccgacatcgtgtcgagcccccatatgggccgcgaacctttcataatgatgcctgtaagcaccacaatattgatcacaacctaacaatgaaggagaaatcatgatgaccgatctcgacctggctaaaaaacagatcacctggctggcggcgcacctgcgttcccggatcgttgacgagcgtggcggtggtagctctaccgtggagacactgatttggattggtcttgtcgtggcaacggtggttgctgtgggcgccgtggtgatggcattcatcaagtcgaagatgcctcactgacgacgatgcgtagcaggttcacaactgatcagcgtggcggtggtagcgcgtcggtggggatgctcctgctgatgcctgcgatcatgctgctggcattcggtgggatcgaggtcgggatgtggtgtcacgcccatcagtcgaccatcgcggcagcccaaagcgccgcggaggctcagcgtgtcgtccatccagctccggggtcggcacaggaggcagcctcgcagatcactagtcatggcggggtgcgtgatgcgcgggtgtcggtgcgtgatgatggttccactgtcacggtgaccgtctcaggtcgggccccatcgatgctggggctgcatcttccggctgtgtcgtcgacagcgtcgatgcccaaggagcgcctgtcgtgaggcgaagtgagcgcggtggagcaagtctaagcgtcgaggtgctcatgtgggcgccgatcgcgctggtgatcatcgggtttgttgtgggtatcggccggatgtcgatggcccaggacgcggtgagtggcgcggcgggggctgcggcccgtgcggcgtcgttggagcgtgatggacagtcggctcagtctgcggcacagcaggcggcgtcggcaaacctgtcgtccggtgggctggcatgtgcgccgagtgtgagcgtggacacgtcagtgtttgcccgtcctgccgggcaggcgggcacggttcacgccacggtcacatgtgtcacctcgctgggtcttgggttcgggtcccggacggtgcacgcaacggggtctgccccggtagacacctatcgggaaaggagaggctgagatggcccgcgatgagcgtggtggcggctcggtgtcggtgtggatgctgctcatggtgccagtgattctggtcatggccggcctggtttttgacgggtcccgtcagatatcggcaacccaggcggcccaggacgcggcggttgcggcatcccgcgccggaactgatgcggcagcgacaccgcagctagctggccacgacggggcggccgtagcagtccaagcggcccgccaggcactatctgctgccggggtggacgggtcggtgcaggaggacgggtcgaccatcacggtgaccacgtctcaaagtcggccgacagtgttcctgtcagcgatcggaatcagccaggtaagggggcatgggcaggcccatgctcagcttgtgggaccgggagaacgcccatgacagtgatacgtcgtatcggtgccctggtggcactgcttgtggtgatagccggcttaccggccgggctcgtggccgcaggcgccccgctagtaccctcgggcctgtcatgggcccatgtgcggcatctgttggttaccccagacatgaccgggtctgtgctggtgtggctggtcagcctcatcggctggatcgggtgggcatggttcgccctggccgtcgcagccgaagcggtgacgatgctctcagggcagcggctgcactggcacatgcccggccctcgcctagtgcgccgagtggcagccggtcttctcattgccgcgttcgcggccgcaccggcagccacaagcacggctcacgccgccgaggccacccatgtggcggtcgccgcccaggctggaccggcacacgcggcccccgcccaggacagccccgccaccacctctcaggccccggacgcctccaccactccgaaaatctggaagacctacacggtgcgggccaacgactacctgtggaagatcgccgagcactactacggtgacggcgcccaattccgtcgtatcgccgaagcctccggtatcgacccgcactcagagctgaaagtcggccagaaactggtgctaccggttcccgagaacacggccgcagttcattcggttaaagcgggggagtatctgtgggagatcgccgagcactactacggtgacggtgcccagtaccataaaatcgctgaagcttccggtatcgatgcccattccgatctagccgtgggccaaaaactcgtcatccccgggcccctccgccacgacgccacgccgccacaccactcggcgtcgacccacgcgaaggccgccaccccagcccacacgcccacgcgacggcctgcgcctgcccacaaagccacgcccgccccgacgccggccaccccaactactccgacccacacggtgaccccagctccggcctctgccggccactcgaccagcgacgagcacccaatccatacggataccgccgcagcggacaaggccagcgacgaggacgccctgtccccaatccaggtgggtttgaccgccagcgtcggactggtgctggtcgccggactgatcaccaccctcaaccgccgctaccggacccggttcacccgccagccccgcggcaaggccatgaccctgcccagcccggacgcccaaactgccgagatagcgctgcgcagcaccggggcgactgacactctgacgatcacctgcctcgaccaggcgctccgcgcgatcggcgcatggtgccaccactgcgggcacccgctgccacccctgctggccgcccgcgtcgacgacgaccggatcgacctgctgttatcgcaggtgacccccgaccatcccgaggcggtggagctggccgccgacggatcggtgtggaccctcaccgccgaccggatcgacgacctgctagcccacaccgatgacaaccaagcggctccgtggccgtctctggtcacactgggacgcgacgacgacggcgcccacatcctcatcgacttggaagccgccggaaccttgcacctgatcgccgacgacgaccaggtcgacgcggccctcgccgcgatcgccgtggaactggccacctgtgactggtccgacgaagtcaacgtcaccctcgtcggccaggtgtgcccgggcctagaagaggccttgggctctccaaccttgactcgcgccgccaccgtcgacgctctcttggagacgttggaggctcgcgccgacgatcagcgtcacgttctcgccgaaggaggctccctggccactcgccgagccgacccggctatctccgacgggtttgacgctgaggtgatccttcttgacaccgacctgaccgagtcccagcgttaccggctcaccgacctgatcaaggacctgccccgggtgtcggtggccgcggtgacgaccagctccaccaatccggatgactgggccctgagcttctcaggtgacccgctggtcgcagagttggtccccctcggctggcacatcaccccccagaccctctccccagatctctacggccgcgtggtcgaactgctagacaactctgcggccgacgactacgcacccgccgactggtgggaccatgacgccgaagaaactgacgaggatgagcctgtcactaccagtaggcgagcccgccctagtatccgcttgaccaccctgaccggtggtatcgatttatccagcgtcgacattgacgccatcattgatgacgccaacgaggctctcgatgctgaagagactaacggcggggtttgtgttgatgctgcccagcctggcactaataccccgttccctatcgatgaggttgacccgttaagtggtgacggtccggtcctgtcgatcattggtcatcccgacatcatcggtgccgctgggacgaagggccgctctccatggcgctgccagcagttggccctttacatcgctgagcatccgggagcatcaggagccactatcgccgacgacctaggtctctcacccgcaactattcgttctatgaccacgcacctgcgccgctggttgggtgctgacgggaacggggtggcctacatgccccccgccacgcacggctaccggcttgatgagcgggtcgtcactgatgtggatttgattgatgctgctttggctgggcgaggcatcaataccgccgacaccaccactcttgtcgctatcctcaaactcagccgaggccgaatattcgccggaattcccgactcagacctccgacagttccgagcatccacgtaccacattgaagcccggatcgttgatgcggctcttcaggtgacggatcgggctttggaggccggggacttggatctagcccggtgggcactcacccaagggctactagcatctcccgatcatgaggacctggtagctggatgtgtgcgcaccgagtaccaggccgggaacatggacaaggtcgctgagctggttgatcatctatcggctaccgcgcgacgcctgggtgtcgatttgaacgaggacactacccggattatcgatacagtcactcacttgggcaggaaagcctcatgaatgctcctgcgcctcatttgttttgctagaaaggttttcatgcatcatcatcgcatcatcgtggctgcggtagcagtcgctgctcttacggtcggctgccactcgacaggctcaacatcggcccctacaccggcaccaagtgcctccacggtctcggcgagtcctgcccctagcccgacccccacggcgggggcgatcagcgcgaccgacgccgaaaacatctaccgcaccttgcacaccaacgtcttcgagttggagaagaagggtggcctggtacccggggaacccgcacccgcgaccctgtcgaactacgccaccggccaggccctcaagaactacatgaccttcatgcaccaaatctcgggtctaggtctcacatggaagtcgggagcctcaaagatcactgtggtgcgggagaaaaagggtgataccacctaccccgaggccgctatcgccttggaatcgtgcgaagacggcagctccatccgatcggtggaccgccacggacaggctgaccatggccggctcacacacgtcgacagttggtatgcccgcgataagaagggcaccatcaaaatgatcgcacgtaacggagtggaggtttcctcatgcgacgtcaagtaatcaccgcggccgtgctgggcctgaccctggccaccacctccctgcccgccctcgcagataatggagacttcagtggccatacagacacggatggtcctggttacgatgtgcgtactgaggtggattaccatcacaccaccggtggtgcgggtgggggtgccacgacagggggccatcatgggggcaaaacccacggtgatggtgaaggtgaggctattgatgggcgttctcgcgccgatgccgaagccgaactagacgaagccgaccgtaaccaggacttgacttgtgatgtcatgctcccaccggcgccgaataccccagccggccaggaatgggcgaaagaatgcaatcccccagcgaaaaaggggcagaaggccaccccgaagcccgacccggtgttagtgggccgtcacgcagccttgcagctcacccttcccggcgcggcccctcgtatcgatccgtcccccgaccttaaccggtggcactcggcagcagtgggccaggctttgtggttgtcagttgatgaccccaccgccactacacagaaatcgatcacgtttatgggccaggttgtctcgttgagcgccaaacgtaacggtttgtcgtttgatatgggtgatggtcatgtcgtgcactgtgatgccacgacgacatggacggagtcggtggaaccggggaccccctcacccacgtgcggttacacctaccaacaggcagccccggccgggggctataaggtcaccgcgatcacttcgtgggatgtgacctggtcggtactaggacacacgggcacagtgcatgttgagaaagccggtgggcagatgcttcccgtcggcgaggtggagtcggttgtcacccgccaatgacccctgataacccgagtctctacgaggtgttggggataccaccacaggcatccccaacacagatcaaagaggcatggcgcaccaccgcgaaagcgacccaccctgatgccggtggcaccaacgaggccttcacaaccgcccagcacgcctgggaagtgctgtctgatcccgaacagcgtgctgcctacgatgccgccctatcgggggaggacgcctctgaccaggaggcccttgacggcactgtggacgtcgaccccctcgccgagtggccttggtgtgtccccttcctcgaggccaccccacgactgcgccacccgtgccccggcatagttgagtctgtcgtcgtggccgccgccgggatcatgaccggcatcggctggcacgagctattgaaatcacttgtcgtggccccggggttcgtgggggcgtggtgggtgatttcggttccattggtcgtggcagtgacatggctcggcgcgatcacggggatttgcgccatcatggccgggctcgtctggctgggatggggtctgatcggtggtgcggccttgtggggtcagccgtgggtggtcactgcgatagcaaccgggtgggtggcctgggtggccggtgtggtgtggtggtggcaccgacggatggcctggcctgcccgcacctgccgggcaggaaacatgattgacatgcccgaggatgacccgccgtgggtagaaccggtggagttggtggcagaactcatcccctccgtgcgggctatgtggtcccctgataggcaaaccgttgtcgtgatagccggtcggcgggtagcgacgttagggatgccgatgcgagggtggcgtggcatcgatatgcggggctggaacccgatcggtgccgacaccgcgtggatcgttgaccagataggcggctggctggccgaccaagacaaaccgctcaccatcgacgggcgcatcttgtacgagacctgggacaggctacagacagttcgtcctcacagctgagaaaaattttgggtccgccctgcatatcggggcctcttcataccttcaaaagtgtgaagggaatacagactcttcgactggaattaaaatggtatatggcgtgtccggtccgcacccagctccacgatgcgccatagaggagccataacttcaccaatcgtatacgatatgagtgtaggtgagcatctaccggtggccgacagtcagatacaagcatgggcggatgaagcagaagctgattatgacctcagcatgcttccgccgtctcgacgtggtcgcccaccggtggggaggggcccgggcactgtggtccctgtgcgcttcgacgcggacactctcaaggcgttgtcacaacgagcccctgacgaaggattgaccacgcgttctgacgcgatccgtgctgcggttaaccagtggctcggcctcggctcgtaaacattatcggcgcgacaaccttactgatgacgctgttggttacgccgtagagcacatcttgtactcgtgggcgctcgacgatgccgatgatcctcgttgctggatgatgattcggtgttgacccagctggcctcctcatggagctagttatcctcatctacgacgatggctatgaactcctgatccacgccatgaaagcccgccctcagtatctgagctacttcgctatctagtgttgttgggcgagttgaactcaacttttctccgacgcaagcgccaataaaaggctgatccatccgaataccaccaaacacggctgaagtgtggaacagattcagcaagacagggtgcggtgctcgggtgcgttggggagatgaggatattcaggcttctggcgggatgtggcttgatgacgtccaggatcaccggttcggttttgaaggtgccttgcattaatgtcgacagggtcgtacgactcgaggactggatcgaccagcccgttgcgtctgaagaacttcatccaccccggtggagctccggccgcgtactggtgcaacggatcattagcatgggtagcgtgagtatgccttcgatcgtggtcagtgctgtcatcatccaagattctgacgggcggcttctcactgtccgtaaacgaggcgccgaggcattcatgctgccaggcggcaagccggagcccggcgaggactcgcgtcaggcagtagtccgggaagtgcacgaagagctcggcgtctcattgtcttccgacgacctgcgtcgggtgggagtgttcaccacgcgagcagcgaatgaggccggccatcaggtggtggcgacgattttcacccacaccccggttgcggtgagtgagccagctgctgagatcgagcagattcgttggctcgattggagtgtcgacgccctgcctgatgacctggccccgctgctggtcgaggcagtcatcccgtggctgcggcgccgtatccggtcggtcgctgtattcacgggtgcgaaggatggaaccgaccctcattatcgtgtcgaagcaaccgccttgggccggggtctcgcacacgccgggatcaccctggtttatggcggcgggaaggtcgggatgatgggtgctgttgctgatgcggccctcgctgctggcggcgctgtgatcggagtgatgccgcagcacttggtggacggggagatcgcccatcctagtctgactcacctcgaggtagtgcggactatgcatgagcgcaagcagcggatgagtgacctagctgacgcgttcgtcgcgctacccggcggcggcggaacccttgacgagctattcgaagcatggacatggcagcagctcggtgtacacagcaaacccgtggccttgtacgactcgaccttctgggcaccgctgaccgcgctactcaaccacatgaccatcgaaggcttcatccgccctgaggaccgcgcctcgctcgtgatcgccgataccatacatcagctgatggccgatcttgagggatggaccccaccaccaccgaagtggcgctcgtgacatagaacaaatgattctgactatggctcattgacatctgcgcagcggctactagctccattgacttcaaatcgggccttggccgaggctcggttcaggtggcccggaatggatccccacaaattgaatgctcatgatcgaggtgatgaacgcccactctattgtcctacgcccggttgtatccagcgagcaattgaaggtgctgcgcctgttggtcgaccaggccgagccactcatcatcgacgggcgcatcttgtacgaggcatgggacaggctgcaaacagcccgtccggcccgctagaaaaaatttttagggcccgctccgcacatcccggtctgtacccacaccttcaagggtgtgaagggaataaaaacacacctaacaacaactttgtttcatgatttggcgcgtcggacccttcctgaccgatgtcgtgcgcaacaatggacccatgagttcgcctaccaagatgcgccggaagggaacacgcggcccgaaacctcgcagcgacgaggagctaacggctgtgatgtgccgcatcccagagtcagtggccgaacgtgtcagcgatatggcttgggagctgaggctctcccgatccgatcttgtgggctggtcggccctctatgcactcaactcgatgctcagacagcgcggagaggacacgattccggttccggagtatctggacaaggccgtgctcactgcgttgtatcccgatgggttgcccttcgacgaggacaacgaggagccgggcgagaatgccgggcaggaggagcttgcgatgactggatgagcccgaacatggttgaaggccgccccgccaggcgaccttcaatcaatggtttcggttgtcagctgcagccacccttgccaggtgctgtggttcttctccagaggaggagggaccgccatgaagaccaagaagacctagaagatccaaaagaaccggtttcagcttttgcttcggtcttcatggtagctgatagcccgcgtcgttggaagtgcgacgacgccgatcctcatcggtatcgcaccctgaaacagggtgttgaacatgaagggttgaccgctatgtcaagccatgagacgccctcccggagggcgtcatgaccgctttaattcaagctctgccgacagctgaactgtctgctggacctggtgctagcagtccagctagaccctctgctgagggcttcatcaagattcatcacgacctcattagtgcgggcgtgtcggggaacgcgatggcgttgttcgtcgcgttacgtaaccagcccggctgtgatcagtggacccgtcactcgtacctgcggctagcccaatggtgcggctgggatgggctgtcggaggcggcgggctgtaagcgggtgcagcgggccgctgctgagctcgctagcggtggttggctggaatcgcgggtcggccatgatcgtcgcaccgctaagacgctggtgtggcatcggttgaccagccccgacaccgaccgctgggagcaattgccgcggattgtgtgggcgaggatctgccagatcgccggggagacgtcgggagagtgggtgaggcattggctggtgtggcggatgctggccggtcgtactggtgtggctcaggcccctacgaccatcgtggcccggttcctgggctgttcttcgcgccaggtctcccatatccgtggggctctcgttgatgccggtctgctcggctgtgacgaggtgtcgggggcggcgagccgggtgtggttcccctcgatggccgaggagtgtgcagcggatcgtgaggtggtcgatggggccgtcgtcgatgctgaggtgggctctggtgaaggtgtcgaggagggcggggaacccctgtcgattttgtccacccacccctgtcgattttgtccacccacccctgtcgattttgtccgccaagtattagacaaaccattagacagtgaattagaccctgggtcgcgtcagcgtgttagctcaccaacgcgcgcgcgcgcggcggccgagccgccgaagccaacgaaccccacaccaccaacgcctgaaccagcagcccccgcttcagacagtcctgtgtcagcgcacgctgatgaggctgccgagttggcgtggcagttcgtggggtggtgtcctcagctggtaggggcaccaaagaaggtgcgtggccagctccgtcagatggttgccaagcagatccgtctccatcgtgcctggctggatgtgccggcgttgactgttgccgctgagcgagtccgggaaatcggggcgctgggtgatcggcactgcgagatcgttcgagaaacgttgcatggcgtgatcgccgaccgcaaggcagctcccccagccccctcaccctcaccagacgaaggagacacgactgtgtggatttacaaagaccctcatgagactcttgacgagtttgcggccaggactgagccctctcgtgtgtgggaggtctccgagcgcgatgacatggctggcgggatcgccgtgaacttgctggcggctaagccggatgatccgatgggctggctgactcgccggcaaaccatgctgatggtccggttcccccaagccgtcgacgaggtcgtagagatgtgtcacatcgtgcgcgccgccttggaggccgacatggccgccggaacccggtgggaggaccgatgaggtcactgcggcgaaacatcatggttgtggctggtgtgctcggcgtcgcggtagcggcgggcccgaccttagccaggtcgttgccgtttgctgccgacacgacaccgacgagcagaaccgctactgccccggctacggtcggtgcgggggccgctgctggggcgttgaaccgtctgccagtcaaaggcaaagcagcgatgaccggatacagccggactcaattcgggcaggcgtggaccgatgacaccgaccgggaactgacccgcccctggggccacaacggatgcgacacccgcaacgatgccctggcccgcgacctggtcgaggcccacctgaaacccggatcacgatgcgtggtcgcctctggtcgcctccacgacccctacaccggggccacactcgcctggcggcgcggccggcacacctcaacggcagtccaaatcgaccatgtagtcgccctcgggaacgcctgggtcaccggggcccaacacctcccagcaccgacgcggcgcgctcttgcgaacgacccactgaacctggtggccgtcgacgggcctgccaacgaagctaaacgcgacggggacgcagccacctggctaccgcctaacaaggcctaccggtgcgactacgtggcccgccagatcgcagtcaaaacgaaataccagctctgggtcacccccgcagaaaaaaccgctatggcgcgggtactagaccgctgcccagcccagacacttcccacaggagccacacgatgaccacccattggacccccgaacaactcctagaacccggaatcggagtcatcctcgacaccgaaaccaccgacctggacgggcgcatcatcgaaatatcgatcattgacgcagcaaccgggacagtcctgatgaaccaactcatcaacccccaaggagccccgatctacgccgaggcccgcaccgtccaccacatcagccccgacgatctcgcgacagcccccacgttcacccaggtgtggccccggctggaggatgtggtggccgatcgggtcgtcatggcctggaacgccccctttgatcagggacgtatcgaagccgagtatggcctcgcagggctggatgctccggcgtggccgtggtgctgcctgatgcgtttagaagcggccatgatgggctgccgatggcggcgactagacgggccacaccggggcctcggcgacgtgatagcagccaggcagaggcttatagcgttgcagcagatgccgtcgatgccagccaccgcctagaacaccagcactgacaggcgcccgagtggattggggttggatcaggcaggcagataggtgtcgagggcgtcgcggatgacctgggaggcgctggtgacggtctgggctgcgtaggcgtcgagtcgggcgttggtgcgtgcgtcgaggcggacctgacggcgaggtgaccgcccctggccggtagcgcggtctgagccgagtgccggccgtcctcggccgaggaatgcgcggctggcgcgcgcggcgtccttgccgtggaacaccgggctggtttgcggggtctgggttgcctcgtcactctcagcccactcggccagagcgtcgacatcgaacccggcaggggtggtgctcatgctcgctctccgttcagcttggtgatggtcgtggctcgcctgatcgtttcgccacggcggcaacagggagcggctgggtgtggggcggggccgggctgggccc

SEQ ID NO: 189 - DNA, 15010 bp, Propionibacterium acnes
ggccgccaagaaacccaacgccagcgccgcagcaatcgccgcacgcgcacccgtagcccacgcccctgccgtacgtcccctcatcatcttgacgaccacgcccacaccggcgcacgtcgtcagcaacgtcaacaccgttccaccccagctgtccgctcccagcggggccaaaaccttgtcgtggatgtcgttctgtaaccccaccagcgggccggtaatccacccgacccagctcatcgccacggtccagtccaacaaccggcacagcaacgcaatgaccatcaggtacgtgttccaacacatgccaataatggaggcccacatactcttcagcggggccgtaacgccaccatcgtccatcgacatctggtactgaaacaagtgaataccgttggagtcagtcacattgaaaccgtcacccatccagcccagccccgggcccgatgccatggcaggcacactgctcagcgccaccaccagaaccagcgtggtgacgatgatacggaaccgccgctccccggccccggggcggcgtggatgacggctcacgctgtctcccggtcgtgctcgggcgggttggagctggcggcttcgcggtggggagcgtaggcaggtctcagtagtcgaatttcaccgacgttgccgtgttggtcggcgtacaggccacaaccggggcctccggggttgagggcaatcttgaccaggtcagcgaactcttcaggggacgttttagggtccacgcccaggaactcgacacctttctgggcgaggttgatgttgtcgcacagcaacacgatgcgatgctgaatgaggttgcggacggtctcgttggggtaatcggcctcggggtcgtgggagccggtgataagccaggcgttggctcggcgggattcgcgcacgtactcgtcaatggcgtgggaggcttccggcgaggacgacatgtgatgaaactcgtcaacgatgaaagcggcgtcgcgggcccggtcgctgaagcacaccaggcgagccagacgggcaatgagcgcgtagagggctcggccaaacaccttgtgcgggggcagctgccgaaacaaatgttctgacagcatctcctcggcgttaggaagagcgatgccacaagtgccaatgatgaggatgtcggcgctcaggtcggcgggaggaaggtccgggtcaaagatggccgaagctagggaggccgagttctcgatgtcagcgaacacggcaatcctgtcagcgatcgcggtggcctcgggaaggtcgcactcctcggccaggtggcgggccaaacgcccacacgaggtgatctggtggtcacgcatgtaggccggtttgaggaccttggccagcgtggtcccggccacaccgatggtctccaagttaagcaaggtcagcaagaacgactgggcgacctgcccggccatctccgggggaaggatgcgcagcgggtccagcgacagcttggggtgggccgtgtcgacgatctggcgtctaaccccgtcgatagagttgacaaaggttacccactcccgctcatcggagttgtcggtggcaataatgcgcccgccccgggccgcgatggctgcgcacagccgcttctcggccatcgtcttgcccgcgcccatcttgccgatgaacgccaccgtgttgcctttctgatcctgagtgtcggcatgcaaatcgaggtaggccagcgactgcaacggggagcctgtgaccacagccaacgggatgccggtggtacggcccaaccggtactcgaccaccgggatagatgcggcgaacgcggaggcgtgagtcagctgacggtaggcgttaagcgaggaggagaaccggccaccgggccgggcagcccacagcaagtcctcctgacggcccacgggacgcacccacgtgaagtcaccgaacaccggatcattgacgaacgctcctgccagctcctcggtggtctcaaagtcaggagacgagacagtgacggtgataagagcctggatctcgacctcacgctcatcggcggccagctcggcgttgtagtcgacgagcacctgagcggaatgctcgatagacatgagggtcgaagcctgggtcatctcaccgccctcaacattgtcgagctggtcgacggtttggcggatggcccgctgatttttctgcatcgcagcgtgacgggtccgggccactccccggatcgccacgtcgaccggcacgccagtgtcgtcgatacggcccaggaactcgtaggcaggccacgtcatcgtgcggggcaccttacccagcacgatatgggactggtagacggtctcgccggtgtcggcaccgattttgaggacgcgacgattccacgcctgagccgtccgggacatgtgggagactcgcttgtcatcctcgctggccagcaggtcggaggtcgcggcctcatcgatgaccaactcccccagcgcggcacgtccaacctcatccatgagggcgattccctcgccaggggcatcatcacgcaaccgggtcgggtggcctgacaggtgctgccgaagccagatctgttcatcaacggtgaccgggcggggttggaacgctgccggcagtttcgcaccgaattccttagcctgacggagggcccactcccgtgcgacacggccaggagcggtggtcataagtccggcggcttcggtgattttgttgagggcggcggtccaggcggtgtgggtgcgtattttctggtcttggttgagtttgatcgataggaaccacacgcgccggcctagggatgcggtttcaggctggtcgagggtggcgtcgatttcgtcggcccacacggggtgttcgctcaggtcgaggccggcggccatggcgtcgacgatttctgtggggtcggtccaggtgagggctccgttgaggcagaactcgtggcgggcgaggtggcggaataggtcgcggtgagctgcggcgacggtgagggaggcgttctcggtgacgggtcgctggaggggagtaagtcgccaggtggcccagatgtcgccggtggaggtccagacgaggttgtcgaagaggaaccgttcggggatggacatcatgactccttttcggcggcggcgaggaaggcttccaggccgctgcggcgtacagcgttcccggtagggtgcaggggttttctgggggtgggttcagatttcgaatgtgggaggggtttgtggatggtatcggtgtcctcggcgagggcttggtcgagcaggcaggtggccggggtgtcggtagtctcgtccagctcgtcgatcatctcgtcgaggaggttgggggtggtggatgcggcccacacaggtgggatagccggtgcgggtcgaggcggtgtggggaggcggagtttggtttggccccagaggggtgtgtgggtcatgccggcgggagtggtggcggcgtgagtggtcacacgccaccagcccgacagccatgccagaggtgaccaggtccagtcgatgcgaccaacaacgaactgggcgaaccatccggcagccagcgcgaaaatgaaaccgcggatggtcatgcccccgtcgataattttgaagcccatcatcgcggcaggaactacgccgccgacagcgagcacctgatagatcgtgtagggcccgccaggaatccttcgacctgaggaatccttgccgataatgcggggctgctggcgggcctcggtgtgccactgaatatccacgatcagctcttgcccaatccttgcatcatctgtccgaagaattggatcgcgttaccttcgataagccagtgcgccataccacacacaaacagcatggagacgatcttggccaggctcataccgtgtttgaagatgttgaacgcggcaatgcccacgactacgaccatggcgacggctcgcaccgcggactgaccttcacctgccttgatcgtcgtccattcgaagaggttctgcgattccagtggcagcaggaggaattgatcgagcatgagaggttttcctttcaggaagccgaccgggatggtcccggtactgacgggctggacggcacgggtgtgccggccaggggcagaaggcgtgacggctggtcgagggcggcaacctcccagcggcctgcacggctgacaagagtcaggccgtactggctagtccgggtagtggattcgtcaccggtgggctggcatgtcacggtcaccgtgacggtaatcttctgccggtctgaggggggggggacctcgtcaggtcccaccacatgagtggttttcactgatacgcatggggctgggtcaaccgcggtgaaagcggtccctgggctactccatctcgacaggtcgtcgctgccactcagcatcgcggccaagaaacccgaagaggtctgggcagccgggtcagcaggacgaatctccgaggagtccacgtcgggggctgaggccggtgcaggcatggggatctgtccaggtagacgcaaggcgatggccttgccgttggaatcgacgtggaccgggactgaccaggcctgtccgctcccggattggccgcccatggtgaccacggtgacctgccacaggctcggatcagacggggagacggtagcgtcataggcggtgacggtggtgggcgctggaccaggtttgcggggcatgcgcgcatcggtgatcttggccgccaccaggtgttccagattgtccaagtgcccggagtcagaggtcagcagaagagtagtcacctcgaccgcggtggctgaggcgatctgagctgtgcggcggtcgtgatgggtggtgtcagtgctgacagctgtggtgggagcggatgccggggccgccgaacggaccagggcaacggggccgcatgcgactccgcacagcacgagggcaaggaagcctttggtggccatcgatccggtgtggggccagggacccacgttttcctgtgcctgttttttcttggccgaccaacggcgggacttagggttagcggatgcaccttctggggtgcatgctcgtctcaatcgcatcggtcacctccttcactggatgaagggaccaaggaggtgaccgatgtgcggtcgaacccgaaaaagttcaaacttttttctgggtctgcctcaagtacgacagaaggcctgcatcatcacggcgttgtggtagcagatcttgcgtcagcgcaaatgcatgggcctcgtaggagtagctcttaggtaggtcccggtggttgcggccagggcgagggtgtcgggtatgtgtagcgctagtcccgggttcgtggtgtgagggcttttgggtgctgacatgcactacccattgctagacgctgtgctgtggcatggctggacgtctagcagacgggttgacatcacctttaggctggcagcgcccgaggccgcaggccagaggaagcggacagcctaacgattgacgtccccctctcctttccccaacctcctggagtcgatgacccggagatagatcgatgtctatgcatcggtgcatcgatatacctatgtatctgtctgtggtttttagaggccactcccgtcgccccgggccgctcagcgataccgcaaggctgtgtgggatcagctgtgccgctcccccgacatggcagacagcaccgttgcatgagaactgactgacactgtggcgccgcggaggtctcccgcggcgtccgctggggcgagtgcatgcctgtcagctcatcttttatcgtcatgtttccccttgtcagagcggtctttgcaaagtgacaacgtcaggggtcttgacgacaacatcctcgacaacatcgtggcggtggtctgtgtctcgtcagttcaacgcaccggggaaagaggcaccgctgatgttcaccaccacaaacaccctcaacgatgaatgggaccagattcgcgccactgagatcgattggcatgactgccctgaactgatgcactgcatcgacgttgatgatgtgttggccgtcattcctgccgcccccgacgccatcttgggctacctcattgcccgggctcagggcggtgacgagttggccacccgcactatcatccaagcgttcacaggcaagcttattttgatggccacggccaccaaggtgcgccgtactaatgacggcttcaatgatctgttggcgggtctgtgggagacgatcatcacgtacccgttagatcgtcgccctgacaagatcgctgcgaacctcatcctcgacacgttgcaccgggttacccggttttggcgtgctgattcccccgatgaggaagaggctcacggtctggtgcccttccctgacactctcatcgccccagagcccgatgaggacgtcacagctagccaggccatcgccttggcggtggaccgcaactggattaccgaggacctagcccgcctcatgagccatatttactgtgacggtatgactggagctgatgcgggtcgtctgcatggctgcgctccagctacggtgcgatctcgatgccgtgatggtcgggccgtgttgcagcgcaacgccgagacgatcctggccgtctgctgatccctctcttgctcatgcctgccgccaccctacccctacctgctagaaacatagccatgtctccagcaacgcatctagcatatcttctagcaattgatctagctatcatatagctgatgatctagctatcatatagctgtgtctccagcccaaaggacagcccaatggcatgcttgccacaggaaggtgcgtcagcctcccgaaatactggaaggagctttagcgtgcaggacatgaccagtcctattgaccgatccccgttcgaccgcactattgcggtgtggaaccacaaaggcggcacgttcaagacgtccgtcgtggcgaacctgggatacctgttcgccgccgggggcaacaaggtgttgatggtcgacatggatccccaggccaatctcgacattgacttcggtatacccgcgggagaacgtgaacggggcatgggattagccgaggcgctacgtgaggggactgtccttcccccaccgcagcatctcagcgaaaaccttcacctggtcagtggcggcgctgctctcaacgagttcaccgaccccgcatccttagcggccatcctcgaccgagtcaccaccgcacgctacgacctgctagctcaggcccttgccccgctggcctgggactatgacctcatcttcatcgactccgggccggcccaaactctgctgtcccagaccatccttggagtagcccgctggctggtagtgcccacccgcaccgataacgcctcaatcactggcctcgtcgacgttcaagacgccatcgacggggttgcctcctgcaaccctgaccttcaactactcggcgttgtcctagccggcgtgggggcccgggccacccggatcgccgcagataaacgccacgccatcgacacagtgctgggggcaggaaccgttttcgatgcggtcatccactactccgagaaggtgtccgtgctcgcacgccagcagggcaagaccgtcgccgagctagccaacgagtaccacaacacccagcccgcctacacctacctagctaaaggccagaacatccccaacgtcgccaaggcagccgtcagcatcgaaactgattatctgaggctggccaccgagatcagcgaccgcatgttcaccagcgacgagcaggagcctgatcatgactgacgatccgactccatccgagcagaacaaccccaccagcgacgacatgcgcttggccgaagaatgggccaacagcggccgcacagtgggagccctgccgcgccgtcaacggcctcagcgacccacaccccgcaccaccagccaacctcctgtctcgtcccctgacacaccggctccgaaaaaagcccagaagacccccaccagccagcctggccgtcaacggatcaacgtcaccgtctacgttgtgcccgaactccatgagcggctgcgctcccgatcggcggcgacgggggtgacggtctcggatctggtggtgcatgcgttagcgttcgtcgccgatcatgcgggggaggcgatcgccgatgatctgcgcgtcgagacgggccccggcatgggggccggactgttcgatgtgaccccatcgcggccagtaggggtcgccaaaacccagctgggggtgcgaatgacccgccacaacaaggatggtttggaccagctgacccggacgagtggggcccgtgaccgcagccatcttgtgtctgtcgccgtgcgcgactatctcgactccaaccctgtaaagaaaggccgacatgtccgctgatgaaactcctgccgcccggggtgggcgacgctttgatacgaccgtcaagcccaggcgccgtcccatgcttatcgccgccggtatcgccatcgtgatagtcggcgcgctcctcatcactcagttgattcgctccgcccaaaccgagcatcgcgtgctggaagtccacgccgatgtggctcgcggcgaggtcatccgtgacaccgatctggtatcggtgactgtcggccaggtcgacaacgtatcaacggttcccgcagaccagctcgactcactggtcggcaaacgcgccacggcagatcttcgagccggatcactcttgcctgctggggctatcggcccggccgatgtcgttccagctccgggcaagtcgctggtcgggctgaagctagccgccggacagatccctatcggagaccttgctgccgggacgaagctgcgcctgatccagacgtcggcacccagcggctcatccaccaccactgatagcagcaccaataccgatggccagtcgtgggaggcaacaatggcgaccggcaccaaaaagaccgagcaggtcaccttgatcaacgccgaagtgaactcgcgtgatgccgcccggatcgcccaactgacgtcacagggccgtatcgccgtagtgaaggatccgatccgatgagcaccattgttttgaccagcgtctcgggagccccaggggtcaccacgacagcgatcgggctgggcagggtctggccacaatcgagcctggtcgtcgaggatgacacccaccacgccatgctggcgggctacctgcgagcctcccagcacgccgaaccgaacctggccgcagtggcgaacctgacgtcgactccaaccaacgcccaaacggtgtgggaatctatcgccagacccctacccaccgatgacccagtcggcgggctgcgacgcaaaggcatcctcggcccgcccacgccgtggtctcgcgcaggcatcgacccccgatggggattcatgctggccctgtggcggcaactggaggaggctggcatcgacaccatcatcgatttgggtcgcctagccacaccactgacctcaacgccacacctgatcgccgcacccatcgtcgaggacgccgacatgatcttggtgatgatcgaggcgacactacgcgacatcgccggcgcccgcacgatggtggagggactcgctgagcagatgaacttggccggcgcctaccgacgtctcggactgcttgtccaccgtggcggccaggcccgcggcgtcgccgagttcaatgacaaggagatcacctcggcgttacgactcccggtcatcggggccattacccatgacccggccggagccgcccaactctccgacggggtcgggcagcggttcgacaagtcacgtctggcccactcactatcaaaggtggcggccagcctcgtcgatgccataaacaagcgccacgctgatgacgaggaggatctgtgatggccagttttgctgataatccgttcgacaagctgcgctcccaggatgcggcaagagcttcggtagagcaggagcctgatgccggattagcgtcggagttgttttcgacgtcgtcggggtgggccagctctcagcaggtgtcccaagctcaaccggtgatgacccgttcggagaacgtggattggccggttgtcgcggagctagccagtacggccactgatgaggttgaggctgagatcagccggtggagttccactcatgatggggtggcgacgctagacattcgccaggccatcgcggagcctgctattgcctcggcggtgtctacgtatgctgaccgacgccagatcgatgtaggggagacctggcctgatctggtacgccagcgataccgcaaggctgtgtgggatcagctgttcgggatggggcggttgcagccgctgttcgaaatcagcgacgccgaaaacatcatcgtggtgggtaaccatgaggtggttgtcgaccacaacgatggttcccggtcaacgctgccgccggtggccgactcggatgccgagctggaatcccagatcgcccggatggcgaggaatgcgaccccgcggcgagccttcgacgccgatcacaccgatgtgacgatcatgcaccaacagaagttccgtatccacgcgatctcagcggaagtgtcattgcaaccgtcggtggtcatccgccaacatttgctcacccaaatcagtctgggggacctgtcacatcgcggaatgatgccggtggaagtggcccggttcctcgatgaggcggtacaagctggcaagtccatcgtggtcgccggcgagcagggtgcaggcaagacgacgtttttacgagcgttgatccacgccattccgatgcgggagcggttcgccacgttggagaccgatcaggagttgttcgctcatctgatgcctggccgggaaaacacgctggtgctgttcgcccgtgatggtaacggcgaggtggatccggcgactggcacccagcacggcgctatcgagatcgcccagctgattcctcctagcctgcgccaggcgttaactagggtcattgtcggtgaggtgcgcggcaatgaggcctcggccatgttccaggccatgcagtcgggtacaggcaccatgagcagtatccactccccgcgagcctctgaggtgccgtcccggctagcccaaatgatttcgatgggcccggtctacgatctggatcaggccatgctgcagatcggtcattcgatcgactacatcgtctttgttcgtaagcgtgacctgcctgatgggagccggctgcgatttgttgagcagatccgttcagtctcgcctggtgattcgacaactcccagtcttggcgaggtgtacacggctgactcgtggacaggccagccgcttacgccactcatgcctggttcggccgccgatgagctgtctcatttcgcccgagacctggattactgcgaggcccactcatgaacactcccgcactaaccagcgccctcatcgtgaccgggctagggctgatcctgaccatcgacgggctggtcccggcgccgcctcgacctggtgccccgctgagcccggcccaaaggtgggctcggctcacccaccgtcccactggtgcggccgggcgtcgccgggatttgcgttgggggttggctgttcttgtcggtgtcgtgttgtttgtgctcaccgggtgggtggctgcgctggcgctgggccccatcattgtgttgttggcccccaccctgctgggggcggccccaccgaccgatattccgctgatggaggcgctggatcggtgggtgcgtcaggtggctgcggtgctgccacaggggcgagacatcatcacagcggtgcggatctcacggccgcgggccccgaagctgatcgccgggtcggtggatcaactggtgtcccggttggatggccgtatggagccgagggaggcgttccagcggatggccgacgagctggactcggctgaggctgacgcggtgctggcctctctggcgttggcggccactcatccgcggggagcctcgacaacgttgaaggctattgctggcaacatccaacagcggttgaaagtgctgcggcaggtggaggctgagcggtctaagccgcgtaactcggtgcgccagatcacactggtcacgatcgccatgttcggggggctgctcgtgatcggacggtcgtttctggccccgctggcgacccctcccggtcaggtgctggtggccgtggcggtggtcatgtatgtcatcgcactagtgcagatgtatcggatggcgcggccccgtcgacgcacccggatcatggtcaggaggacccgatgaccattactgctttgtccctgctagccggggccatcgtcactgtcggactgctggtcatcgtggcagcattccgcccagccccaggccctgacctggttgccgctctggaggtggtgtcgggtcgcacctcaagcgtcgccgagaacgtcgaccagacccggatcgggcggataggtcgcagcgtgacccgcacattccatgtgtcggtgtccccggccatgcgggccgcactgcgactccaaggcacgacccccgaagcgttctacggtcgacgcctgatctgcgcactgatcggggcgatcctgccgtggctgctcaacgcggtagccatcgcggtaggggcgaattccccgaacctactcatcccttcggcgctgtgtgtggcgttagctggcgctggatggatgctgccggcagcacggttgaaggctgcggccgggcccaccaacgatgactcgttcgaagcgctgctggtattcatcgatttggtcgtgctggaacggctcgccaacgaaacctccgtcgacgcgctcaccaatgcggcaaacatgtcggactcgccgctattcgtccagatccgtcaagtcctcaaccgtgcctccctggaaaacgtcgacccgtggaacgggctagaccggctagccgaggacatcaaactgcccgaactcaccgatgtggtctccatcgcccgcctccaaaacgaaggcgcctccctcgtcgacagtttccgggcccgagtcgccgagttacgcgacgcctacctgctgcgcctgcaacaagaatccaccacgatcacccagcggcttggtttgtggacgatcctgcaagccggctcggtcatgctcatcttgctgggggcggccgccctcacactcatcacagccggataaaccgacaccgtgtcgagcccccatatgggccgcgaacctttcataatgatgcctgtaagcaccacaatattgatcacaacctaacaatgaaggagaaatcatgatgaccgatctcgacctggctaaaaaacagatcacctggctggcggcgcacctgcgttcccggatcgttgacgagcgtggcggtggtagctctaccgtggagacactgatttggattggtgtcatcgtggcgctggtgattggtgtgggcgtcggggtgacggcctatatcaggtcgaagatgcctcactgacgacgatgcgtagcaggttcacaactgatcagcgtggcggtggtagcgcgtcgatggggatgctcctgctgatgcctgcgatcatgctgctggcattcggtgggatcgaggtcgggatgtggtgtcacgcccatcagtcgaccatcgcggcagcccaaagcgccgcggaggctcagcgtgtcgtccatccagctccggggtcggcacaggaggcagcctcgcagatcactagtcatggcggggtgcgtgatacccggatatcggtcagtgatgacggggccactgtcacggtgaccgtggtgggccgggccccatcgatgctggggctgcatcttccggctgtgtcgtcgacagcgtcgatgcccaaggagcgcctgtcgtgaggcgaagtgagcgcggcggagcaagtctaagcgtcgaggtgctcatgtgggcgccgatcgcgctggtgatcatcgggtttgttgtgggtatcggccggatgtcgatggcccaggacgcggtgagtggcgcggctggtgctgcggcccgtgcggcgtcgttggagcgtgatggacagtcggctcagtctgcggcgcagcaggcggcgtcggcgaacctgtcgtccggtgggctggcatgtgcgccgagtgtgagcgtggacacgtcagtgtttgcccgtcctgccgggcaggcgggcacggttcacgccacggtcacgtgtgtcacctcgctgggtcttggattcgggtcccggacggtgcacgcaacggggtctgccccggtagacacctatcgggaaaggagaggctgagatggcccgcgatgagcgtggtggcggctcggtgtcggtgtggatgctgctcatggtgccagtaattctggtcatggccggcctggtttttgacgggtcccgtcagatatcggcaacccaggcggcccaggacgcggcggttgcggcatcccgcgccggaactgatgcggcagcgacaccgcagctagctggccacgacggggcggccgtagcagtccaagcggcccgccaggcactatctgctgccggggtggacgggtcggtgcaggaggacgggtcgaccatcacggtgaccacgtctcaaagtcggccgacagtgttcctgtcagcgatcggaatcagccaggtgaccgggcatgggcaggcccatgctcagcttgtgggaccgggagaacgcccatgacagtgatacgtcgtatcggtgccctggtggcactgctggtggtgatagccggcttaccggccgggctcgtggccgcaggcgccccgctagtaccctcgggcctgtcatgggcccatgtgcggcatctgttggttaccccagacatgaccgggtcggtgctggtgtggctggtcagcctcatcggctggatcgggtgggcatggttcgccctggccgtcgcagccgaagcggtgacgatgctctcagggcagcggctgcactggcacatgcccggccctcgcctagtgcgccgagtggcagccggtctcctcattgccgcgttcgcgggcgcaccggcggccacgtcggcagctcacgcggtcgaggccacccatgtggcggtcgcagctcaggcttccccggcccacgcggccggcacccaggacagccccgccaccacctctcaggccccggacgcctccaccactccgaaaatctggaagacctacacggtgcgggccaacgactacctgtggaagatcgccgagcactactacggtgacg

SEQ ID NO: 190 - DNA, 13200 bp, Propionibacterium acnes
aacaacaccgaaccgttccaacccgccctgttcgagctggccgactgcgcatgaggaccctgcacagacgtgattaaatcgaagggctcaaccagtcatcaggagtcccccgtgcgtttgtaccgcgctgttctcgccgacaccgacatccatatcaccatccgtatctggaacactaccgatcgtgactggacctgggccccccttgacacttgggcccccgacccggccccgaccacaccagcccagttagccgatgaacttcaccgtcacggatggatcacccctgaggtccctactaccctcaccgaggtggctgtcatccccgagaactggcaagctttcgtcgagcatgccctcgctgtccggaaccagcaggctgaccaattgcgcgtcgccgagaacatcctcaccgacatcctcggcgacgccgccgacgccggcctgtctgtcaccgctctcgcccgcacgaccggactatcccgagtcgccgtctacaaacgcagcgccaaaaccatcgactccatgagacacgccacccaggccggcggaatcctcaccccctcctgtctcacccacgctgagagaacagcgctcggcctgcccgacgagtaacccatcgtttacatcctcgactggtccctgcgaccagtgaaccgtgcccccactgcgcccacaatgatcagcacacccacggcgatcatcaggtgggcagcactaactgatcccaacgaaccaagatcaaacaagccctgcccgggagcgtcgagcagtccgtgggcgcgaagccatgctccgagattgccaatgatcttggggatcatcttgttcagtagggctatccctccgatgccgacaacgaggaagacgaggatttcttcgcctgcgttgtttcttcctgtgtttgcggtcatgctgccttctcggggtggatggccagccagctgatgaggttgtcggtgatctgccctgagatttggatcagttcgacttgcccggcctgccatgcccgcgatgtgccggccagcaatgatgctgggacccctactgcgcggccacgggatgcaacctcagccaaggcggcgcgtaactcctcgacggtgctttcgatgtaccaactgccgtcagtactagtctcagcggcatcggtggtagcgataagagcatcggtgaggtcgtcgacggcgcggtccagatcagcgatgtccggtagggctacaggagtcatggtgtgtcttccttctagggtgccttcactggtgaagggtccctagccccggccgatgtgcggtgctgtgggaaaaatgcttcccattggtccgtcttagttaggaaacttggcctaagtgctgtcgagggtcgcgtgttcgtgaccggttcgaagacactgccgccttgtcttcttgcccgtggcgcttccgagatggtcagtgggcgatggctaggccgatgagggcgccgctgcacaggctgggcgcccagggaaggaatcgggtggtgtggtgtcggaaccggtcgattagggcatatagggcgatcagggtgaggccggctatgacagtgacctggatcgtgtcgatgccggttgctgcggccggggctgcccacagtggtgtgatgcgcacatcagagaaaccgaatccgcctcgggagatgagccaggcgatcatccacgctgcgaagatgatggcggtagcgatgacagcacgtatcgccgcagtatggtccgagagggcggtaacgactacagccccgatccatccggcccatccggtccacgctaggactgccggtatccatgtggtgatggcgtcaatgacggcaacccatgccccgatggtggctagcagagcccaggccggccaggtgggtgctggggcccacgctacggcggcgatcatggttgtcgcagatgcagcacagacagcgatcaagcttcggaggctgtaggtgtcgcggtagacgatcttgtcgggattggcggtagctggttctggcaggacgcgggtgagggcaggccatcctgcgaccgcaatagccgcgacggcgaccacccacacaatctgttgcatgggtctcatcatggcccatcatcgatgagtatgggtggccgacatggggtcactcgtagaggggatcgaggggtgtgcgggcgagcatggcttcctgtgtgccgagcatgagggtgccagaatcctcgccagccgattcccagtcgacgatgacctggtcgccgtcaacgctggattcggcgatggtcacccattctccgtcgatattgatgagcaccccagcggccagctccgtggcagcaaccgggtgaggtgggttgtagaagcggtcgatgtcgcaggcagggtcgtcgggttcctcgactaccggaggtggggtcgatctggctgtctcggtgtcgtcggccaggtcggctcccaggatgcgctcccattcggggctggttttcttgcccgctgaggccatcgtctcgtcgatctgttcgtcagtgggccacacaaatttctttttggtccaggtcgtggtgtcgggtcgcagctgatccagcagttccaggtcttgcggggagtgggccttgcgggggtcgggggtgtagaagaattggacttccttgggggctgattcgccggataggtaggtgccgcggccgcgtttgccgaacgggatgcccacgccgacgtgttcggagccgaacatcatgcgggctccgtcagcggacaggggtccggtggcggcacgcccggagaagttgtctcggatttcgccgcccaggaactcggcgtcggggcgttgggtccccagatcgacgtggatacggcaggcggctgccatgcgcagcagggagccgatccagccgaaaacggggcattctccgggcatcccagagaccttgatcgttgaccaccagtttttcgcgttgccgtagaactggcggtactcgtcgatgaggaccagcacgcgggtgaagtcggtctcgcgggccccttcttcttcgatgcggcggtagcggtcctccatgagagaccacagccagtggatgagggcgacctggtcggggacggtagtggcgaccatctcgatgttgggccactcccgcaggcccaggtactcgatgcgtttagggtcgatgacgaagacgcgccagttgcggcgggcaccctcgacggcgtcgccgatcatggacaccgtttttccggtacgggtgcggccggccttgagctggtgggccatgacaccggagatgtcccagaaacaggtgttgccgtcctcgtcgacggcctgggggattttctcccagtctggggagtctgggcccggaagggccacgggtcggggcaccatcgagggcagggggtggcggcgggtgacggtgatggtgtcgtgttccaggtcgaagtcgctgcgccactggccgagcatcatcgccgaggtcaccgcggccaggcgcaattggatgttcgggctggacaaatgggcgccacgttggtggtgaatggtgaagccgtccaggttcccccgatcggttttccaggaatcgacggtgaccgccgacccatagatctgagtggctacttctttagcccgttccttgtctcggtccagatcggttttgtcagggtcaggggtcggggcgcggtattgcaggacgaaccggccggccgggatcgttgcggatgtcaccgtgaactctgccggcgaccaggcagccgcggccgcctgggtgagggccattggcatggtctcgacggcagcctcctcgggggggatggtgagggtcaggcgtcgcggatgcgtcttcttgcgattccatgtgactttctgcctcaccggcaccttcgccgccgactgaatggctaggcgagctgattcggcagtttcggtacgccggccagcgcgtagcgcccgtcgtgcgtgaaggctgcccaccacagcacagcccatacacggcagccacgagcgcggatcagcggctgctgcatagcccccggtagctagtaccgcacctgaccagccggccgcgatacttttccacgccggtttcgcgccaccaggaccagcgttatggacggtctgcttcgaggctgcggagggacgagacagcggagtgctggtcatgccgcggcctccttgtggcaggtcatttcacaggcatgccggccagcgatgatgccgtggcgcaccgccccggtagccgcatagaccgcgcacaactcaaacacggggcacccatcgcaggccgccgggttcatgctttctttgtcccacgatggtgggtcatcggtgcacggcacggccaggccatcctgttgagcggcgctgatagcggtgaataggcgcagctgggcgcgaacttggtctggggtcaggttgacggtgcgggctacacgcatggggttccttcctcttcaccagtgaaggttccctagacccggccgatgtgcggagggatttcagtgttttatcgaggtgaccagccagccggtctgcgctgcgggttcaggtaccagggtcagatgcagcatggtgtggtcggctaggggcacggcgaccaggggcccgtcggcgctcgccccggtgagggtgggagttccggccacggtggtggcgggaatctggttgggtttcgcggccatcagggagcccatgagggtcggggcggcgatctggacgagggcgactttgcgggcggcgggatcgcgggtcaaccagccgcgggtgaaggtgagcgcagccgacgtgatatcggggctcagcggggctggtgtggcggcggggtgggccgttgaggagggccatacgcgcggtagcgctggcgacatcgagcgggtcggagtggggtcaggtgtggggcttagggtccgatgtggcgatggggctaccgccccggtggtgggagacgagactggttgggggtggtgttgagggcgtgggatcagggtgaaggcagccaaactggccgggatgaggatgacggccgcgccgacacttcggagcgaggtcatgtgacgatccttcggtagctcgacgggttgccgtagatcttttccacgttgatgccactatgtgggttgtcggcgctaaccatttggcctccaccgatgtagacggccacgtggtgggcagggcttccccagaggatgaggtcgccgactttgagctggtcacgggccaccgcggtgccgactttctgctggtcggcggcggtgcggggaaggctaatgccgatacgccggtacagcgccgaggtcaggcctgagcagtcgtagccgccatcggctttgccgttgccaccccacacgtaggcgtaggagttgttgtcggcgatcgatttggcccatgccacggcttcggccaggttcttcgacacaccggtctcgttagcggccccggtggcacagttgtttgacaggtgccctgtagtagtggatcccactatttgtttggccatggtttcccatttggcgtaggcatcgggcagggctgagccttgcactgcctgagctgcctgcgtcagcggcatcttctgccagtcagcgatgtcgactaaaccgggaatgtggaatccagggccgccggccgatccggggccagcgtaggtgatggtgtggcctttcaagaacgcctcggtggcgtaggcatcattgttgacctgatccagagtcccgtaccagcccggcaggatgcgctgctgaaaggggccggcgtcaccgtcaccgttagccttcgctgaggtagggtcggccccaagatctgattcttgtttggcggtcataatagcgatgaccgctgcctgggtaggcagtttgtcacgctggaccacagtgacgatggtggtcacgagctgcttctgcctggccgtgaggcctccggcacccacagtgcctccggtgacggtacccacgcaagcatccccgccgacactgccaccgccgacgccagagttgtcgtcgagggccccagagcctactgacagcagcggcacaatgatcacggtcgcgggcaagaccgccaggcccgccagcatcagcactgctgcactcaccacggcgatcacgtgagatgctttcaacgctgcccacctttcgctggtttgagggggcgacgcctgctggtacgcacaggcttggttggtccagtccgccgttggttggcaggcctgggtttgatcggcttgctgggacccggtttgggctccggagtcttaggctccggcttcacatgcctaggcacttcggctgcggtgggaggagtcagcacgtggcgtaccggcttggtgaccttctgggcacccgaaacaaccggcttagacaccaccttggcacctttgaccaccggtgcggctgccttcgcgccggccttcttgactgcacgatgcgctttgatagccccggcctcggcccggccaaccctgctagcagtagcatcgagggctctgtggcccgtcgttgccctcaccggtgcatccttgccctggcgggtctgcttagcgatcgccgacatgccgcctcgcaatgccgaaacatgattgtgggcgtgggcgatcgccgacatgccggccgtcgcgatttttgactggccctgcggggcccctgccccagcacgaatctgctggtaagccgccgacgtgccacgagcacccgccgccattcgcgccaccttcgcagccctagtcactcccgtcgacacgccacccgtggctaccgcagcagcacccgagaccacagtcgaggccatccgccttcgacccaatccggtgagcttgcgaccaccgctgcgcaccatccggcgagcaccccgcccagcccactggccgatcaccgagcccctttcggaacgcttgctgcgcatccaatcgttgatcttgtccctcagccccttctcgcccttgtgacgacgccacatggacatcaagaacccgataatccccacgagctcgagcatgttgacaaccatgaccttgatggcgacatcaccgtcagaggcgaaaaccgacttgatgatgagcatgaccacacccaacatcaccatcgacccgacaatgccgatcatcgagtacaagatcgaacacagatcccggatgagcggatctgtgcggccagggatagcccgcaacacgttgagcatcgacatgaacgccgaccacaccaacttgcacacgtagaaccagcacatgcccgcgaacaccagcaggaccacagccaaacccgccaccgtcgacgagtaaaagaagaaccccaccaaccacgaaccatccgcaatatcgccggcgtaatccgacaacccctcatcacagtcaccaaggtcgtcgcgagcatccgagacgtcatcgtaagggccacccttgagcacctcgatgtacttgtcgtggcacttcgcatcaataatgcggccatagttgagctgctgatgaaccggcgccacgaacgagtccacaatgatcgccgacagcttcggatccttcgagtctcccgtcgaggtcatgtcatcaggaatctcgacctcaccagcggtcgccgtcgcaggatcaaccgaactggtaatcatatgagacagcgccacaccgaactgctgggtgcgagccagcggagtagccaacgtcgtcgtatcgcctgcgaacttcgccaccggggccgccaagaaacccaacgccagcgccgcagcaatcgccgcacgcgcacccgtagcccacgcccctgccgtacgtcccctcatcatcttgacgaccacgcccacaccggcgcacgtcgtcagcaacgtcaacaccgttccaccccagctgtccgctcccagcggggccaaaaccttgtcgtggatgtcgttctgtaaccccaccagcggtccggtaatccacccgacccagctcatcgccacggtccagtccaacaaccggcacaacagggcaatgaccatcaggtacgtgttccaacacatgccaataatggaggcccacatagccttcagcggggccgtaacgccaccatcgtccatcgacatctggtactgaaacaagtgaataccgttggagtcagtcacattgaaaccgtcacccatccagcccagccccgggcccgatgccatggcaggcacactgctcagcgccaccaccagaaccagcgtggtgacgatgatacggaaccgccgctccccggccccggggcggcgtggatgacggctcacgctgtctcctggtcgtgctcgggcgggttggagctggcggcttcgcggtggggagcgtaggcaggtctcagtagtcgaatttcaccgacgttgccgtgttggtcggcgtacaggccacaaccggggcctccggggttgagggcaatcttgaccaggtcagcgaactcttcaggggacgttttagggtccacgcccaggaactcgacacctttctgggcgaggttgatgttgtcgcacagcaacacgatgcgatgctgaatgaggttgcggacggtctcgttggggtaatcggcctcggggtcgtgggagccggtgataagccaggcattggctcggcgggattcgcgcacgtactcgtcaatggcgtgggaggcttccggcgaggacgacatgtgatgaaactcgtcaacaatgaaagcggcgtcgcgggcccggtcgctgaagcacaccaggcgagccagacgggcaatgagcgcgtagagggctcggccaaacaccttgtgcgggggcagctgccgaaacagatgttctgacagcatctcctcggcgttaggaagagcgatgccacaagtgccaatgatgaggatgtcggcactcaggtcggcgggaggaaggtccgggtcaaagatggccgaagctagggaggccgagttctcgatgtcagcgaacacggcaatcctgtcagcgatcgcggtggcctcgggaaggtcgcactcctcggccaggtggcgggccaaacgcccacacgaggtgatctggtggtcacgcatgtaggccggtttgaggaccttggccagcgtggtcccggccacaccgatggtctccaagttaagcaaggtcagcaagaacgactgggcgacctgcccggccatctccgggggaaggatgcgcagcgggtccagcgacagcttggggtgggccgtgtcgacgatctggcgtctaaccccgtcgatagagttgacaaaggttacccactcccgctcatcggagttgtcggtggcaataatgcgcccgccccgggccgcgatggctgcgcacagccgcttctcggccatcgtcttgcccgcgcccatcttgccgatgaacgccaccgtgttgcctttctgatcctgagtgtcggcatgcaaatcgaggtaggccagcgactgcaacggggagcctgtgaccacagccaacgggatgccggtggtacggcccaaccggtactcaaccaccgggatagatgcggcgaacgcggaggcgtgagtcagctgacggtaggcgttaagcgaggaggagaaccggccaccgggccgggcagcccacagcaagtcctcctgacggcccacgggacgcacccacgtgaagtcaccgaacaccggatcattgacgaacgctcctgccagctcctcggtggtctcaaagtcaggagacgagacagtgacggtgataagagcctggatctcgacctcacgctcatcggcggccagctcggcgttgtagtcgacgagcacctgagcggaatgctcgatagacatgagggtcgaagcctgggtcatctcaccgccctcgacgttgtcgagctgatcgaccgtttgacggatagcccgctgatttttctgcatcgcagcgtgacgggtccgggccactccccggatcgccacgtcgaccggcacgccagtgtcgtcgatacggcccaaaaactcgtaggcaggccacgtcatcgtgcggggcaccttacccagcacgatatgggactggtagacggtctcgccggtgtcggcaccgattttgaggacgcgacgattccacgcctgagccgtccgggacatgtgggagactcgcttgtcatcctcgctggccagcaggtcggaggtcgcggcctcatcgatgaccaactcccccagcgcggcacgtccaacctcatccatgagggcgattccctcgccaggggcatcatcacgcaaccgggtcgggtggcctgacaggtgctgccgaagccagatctgttcatcaacggtgaccgggcggggttggaacgctgccggcagtttcgcaccgaattccttagcctgacggagggcccactcccgtgcgacacggccaggagcggtggtcatgagtccggcggcttcggtgattttgttgagggcggcggtccaggcggtgtgggtgcgtattttctggtcttggttgagtttgatcgataggaaccacacgcgccggcctagggattcggtttcaggctggtcgagggtggcgtcgatttcgtcggcccacacggggtgttcgctcaggtcaaggccggcggccatggcgtcgacgatttctgtggggtcggtccaggtgagggctccgttgaggcagaactcgtggcgggcgaggtggcggaataggtcgcggtgagctgcggcgacggtgagggaggcgttctcggtgacgggtcgctggaggggagtgagtcgccaggtggcccagatgtcgccggtggaggtccagacgaggttgtcgaagaggaaccgttcggggatggacatcatgactccttttcggcggcggcgaggaaggcttccaggccgctgcggcgtacagcgttcccggtagggtgcaggggttttctgggggtgggttcagatttcgaatgtgggaggggtttgtggatggtatcggtgtcctcggcgagggcttggtcgagcaggcaggtggccggggtgtcggtagtctcgtccagctcgtcgatcatctcgtcgaggaggttgggggtggtggatgcggcccacacaggtgggatagccggtgcgggtcgaggcggtgtggggaggcggagtttggtttggccccagaggggtgtgtgggtcatgccggcgggagtggtggcggcgtgagtggtcacacgccaccagcccgccagccatgccagaggtgaccaggtccagtcgatgcgaccaacaacgaactgggcgagccatccggcagccagcgcgaaaatgaaaccgcggatggtcatgcccccgtcgataattttgaagcccatcatcgcggcaggaactacgccgccgacagcgagcacctgatagatcgtgtagggcccgccaggaatccttcgacctgaggaatccttaccgataatgcggggctgctggcgggcctcggtgtgccactgaatatccacgatcagctcttgcccaatccttgcatcatctgtccgaagaattggatcgcgttaccttcgataagccagtgcgccataccacacacaaacagcatggagacgatcttggccaggctcataccgtgtttgaagatgttgaacgcggcaatgcccacgactacgaccatggcgacggctcgcaccgcggactgaccttcacctgccttgatcgtcgtccattcgaagaggttctgcgattccagtggcagcaggaggaattgatcgagcatgagaggttttcctttcaggaagccgaccgggatggtcccggtactgacgggctggacggcacgggtgtgccggccaggggcagaaggcgtgacggctggtcgagggaggcaacctcccagcggcctgcacggctgacaagagtcaggccgtactggctggtccgggtagtggattcgtcgccggtgggctggcatgtcacggtcaccgtgacggtaatcttctgccggtctgagggggtggggacctcgtcaggtcccaccacatgagtggttttcactgatacgcatggggctgggtcaaccgcggtgaaagcggtccctgggctgctccatctcgacaggtcggtattcccggtcagcatggcggttaggaagcctgaagaggcttgggcggccgggtcggcggtgcgaagctccgaggtgtctagggtgggggctgaggccggtgcaggcatggggatctgtccaggtagacgcaaggcgatggccttgccgttggaatcgacgtggaccgggactgaccaggcctgtccgctcccggattggccgcccatggtgaccacggtgacctgccacaggctcggatcagacggggagacggtagcgtcataggcggtgacggtggtgggcgctggaccaggtttgcggggcatgcgcgcatcggtgatcttggccgccaccaggtgttccagattgtccaagtgcccggagtcagaggtcagcagaagagtagtcacctcgaccgcggtggctgaggcgatctgagctgtgcggcggtcgtgatgggtggtgtcagtgctgacagctgtggtgggagcggatgccggggccgccgaacggaccagggcaacggggccgcatgcgactccgcacagcacgagggcaaggaagcctttggtggccatcgatccggtgtggggccagggacccacgttttcctgtgcctgttttttcttggccgaccaacggcgggacttagggttagcggatgcaccttctggggtgcatgctcgtctcaatcgcatcggtcacctccttcactggatgaagggaccaaggaggtgaccgatgtgcggtcgaacccgaaaaagttcaaacttttttctgggtctgcctcaagtacgacagaaggcctgcatcatcacggcgttgtggtagcagatcttgcgtcagcgcaaatgtatgggcctcgtaggagtagctcttaggtgggtcccggtggttgcggccagggcgagggtgtcgggtatgtgtagcgctagtcccgggttcgtggtgtgagggcttttgggtgctgacatgcactacccattgctagacgctgtgctgtggcatggctggacgtctagcagacgggttgacatcacctttaggctggcagcgcccgaggccgcaggccagaggaagcggacagcctaacgattgacgtccccctctcctttccccaacctcctggagtcgatgacccggagatagatcgatgtctatgcatctgtgcatcgatatacctatgtatctgtctgtggtttttagaggccactcccgtcgccccgggccgctcagcgataccgcaaggctgtgtgggatcag

SEQ ID NO: 191 - DNA, 8556 bp, Propionibacterium acnes
tgacagcataacgggcctgcccttgaagggttggactctgcacccatttcagccgggtacgttgccggctgggcgaaggaagcagacggcgccgcgattgaagctgccgccgagcacgtcgcgaagacctcccacgcgattgccgaggcgttgcagctcaccgcacagtgagccccacggggcgaccggctcaccccggtcgcccctcaccccccgacaggggaaccgttcccgccgcctgaatctccatacccctgatacgtactacgcggggtcgaggagtggactcccccaccctcgtgtagtacactatactacacagtcattgaggatagaggtgacgtcatgagtttttcgatccgtttaaccgaccatgagcgccgcttagctgattcctacgcccgcctgcactcgcagtccctgagtgaggctttcaagcaagccctcttcgaccgcatcgccgacgagttcgatctgcaagtagcccgtgaggcactcaccgactacgcccgcgacaactaccagtctcgccccatcagcgagctatgggacgagtgtgacctatgagctggcagatcgaaaccacgagccggttcgataaagaattcaaaaagctagaccgctacacccaaaaactcattcacggctggatcacgaaaaacatcgacaacaccgacgatccccgccgccacggcaagcccctcaccggtgatctttccggactgtggcgctaccgcatcggcgactaccgcctcatctgcacactcaacgataaccgcctcaccatcctcgccctgtccatcggtcaccgccgcgacatctaccgataagccgttgcaagactgcggcgtcgacaccgccgggaccctggcccaggccttgggcctggaggaggacgagagcgaggagcacgccgcctgagcggtcgccggcacttcccataacagcaccggtcccggcggcccggccccgcgtctggtgctcggaccgatgccggcgcctggcctccgacgcccgccggggccagcggctgggctacctcgacgtcgacgtacaacgggccgaacgaaccgtgcgctgatttaccaccgcttccgcacagagaacatgcctctgactaggagaaatgacgttttccacagggcctctattactaatatccctattatctctatccacgcgcgcgagcctcagcgttcaagcttcaggtcttgctcgtctccctcgcgcctcgctgcgctcgttgctactgccgccccacccggcaagccgggtgggttgccatcggaataccgtggaccatcccggcgcatacacccagacggtccaagatccaatccacgctcacccgcgacgccgctaacgatcctcatacaccgtagatgccgttctgagagccttccagacccgcacgtgggtttattgcaccgagacccaaatcccctcagaagcgatcctgaaaccgtctacgccccatttccgacggacgctggacaggctgggcggcttgtctcccgccgcagacatggccctggcatatgcggttgccgactggtgggatcagggattggatcacacggcagacggctggtccaaggcgggtgtgcaggtgcggtgagcggcagacgtgaccggtggggtgcactgtcatggccgggcatctgccgagccaccatgcgggccctggaccaggaggcagcccgctgcgaggactgggggaagacggcggcacggatgggccgtcgggatgcggcggccgaattcaccgagactgcggtgcagcatcgtggacagatgcaccacctcatgtcggcacaaaaagtgtgggtgtcgaccgacatggtgtcggctacactggacgccgcaggagacgtgccgagtttcgaggccgtcgacgtccctgccgccgggctcatgggtttggccagccccctgccgccggttaccctgcagcatccgctgtatctgcgcagcgacgagggtgtgacaaccttcactgatccggttctcgtcgacgcgctgggatggtggatggattctgggcgtgtgcacgtggtgatgtgcacacgcacaccccggctgcccaacccggtttatgcggtggcctccccactgacggtggtggagaaaatcacggtgcccaccggcatcgagttcgagaccatggagtccaggatcctgacccccggcggcgtgacaggcgtctcacggcagggcacacgcatgatgatccggttggcgtcatggctgggtgccgcgtgggtgctcatggcgactccgacggtgtcggagccgcaccctatggatggccggtggggaggcccagcaacggggcagacccggccgcgtgatcgggtgaccgtggtcgacatgcggcccatgaggcaggtgcacaccaccaccgaccccaccggcaggcggttgacgacccggcatgtcgtgcgaggacactggacacaccaaccctacggcccggcccgcagtctccgacgcctgcagtgggtcgccccattcatccgcggccccgaaggggctccgttcgtcggcaccgacaccgtcaccgtatggcgccgctagatacgcgggcgcggggggttgacgaacgatgcccccctctttgtgttgtgatcagtcgtgatcggcgggttttaggtcggggtaggtgtcgagaatggccttgaggacgaggtcttggattgtggtgtcattctgggctgccttgaccttcagtccaacgccgatgtcccgggggattctggtctgcaacttgaacaggtctgcctccttggttttgaacagtttggctgcagggttggcaacgggctgttcttggcgctggcgtccaaggttgcttttctttcgggcggtcatgacatcatctccaacagttcgtcggcaacatcggcgaagaaggcgatagtttccggctcaggggtacagccgtaggcgcgcttgatgacttgacgcttggggatgacgtgatcgaccaactgcgtctgggagtcgttggctagaaggtcgcgaccttccttgaacagggaggtattcggttcagctttggaaagcagcaccacgcgcggggttcctgcggcggcgtcgtgcgtctcccaggtgcgcgccatgtcgagcccggacgtgtcggtggggatgataaccagatcggcggcgcgaatggcggcggtgatgatgtcaccgttgcccggcggggtgtcaatgatgacaacttcttcgggtccggcgacgaggtgctggagcgtcgccttgttggccggttccacggggaaccccaaggggtcggcgttactcagtgtgcactcggcccaggatgatgctgacccttgagggtcggcatctttgacgcggaccatacggcccgtctcatggagagctgcagccagcaggatcgctgccgtggtcttaccgacgccacccttggcgttgataatgctccagatcatggtgacacctttcagtgaggatgcatatcagtttacctgcaaggagtaaagacggcaagcagttatgccgtttctgcggcaagccgtcttgcatccttggatgtatagatagttgtctacttatggttgtggatcgtggtgtctcgtaccaggatttagtgtgctcgctgatatgcacgactttcgggcggcctgatctggcggtggtgccactaacccaggagtctgatccgcaaggtgtcctcgactttgaggaaggggtctctgctttcgtgttgacctaaagtcaacggccctgggcgatcactgaatcctaataactttgtatccttccctgattgcatcttagcatccttgaattcaaacagggatggagccatgctgttttgacgacatggatgcactggggtttggttgttgccgatgcggagcgtcaggcggcccgggacgccgccaccgccgacacgctgcgggagatcgtgggactgctgggccggggcggcgaggtcccgcccgccaagacggggcgtaagacgaccggcaggccggccccggcccgcaagtcgtcggccacgcagtaaaggcagggatccgtccctacgcagagagcggaggcagatcctgggggatccgactcttcggttccgtgatcttcccggagatcttcccggatcccccagggctcatcctgatacggggtccgccgacggaccccgtatcagtgggggcgctgccaccagtgatggcgggcgggtcggtcggcgtctaggccccgcccgatggtcgcctggtctacctcgcaggcccgtgctgttgccgaggccgagaacgtctgcccacttgttgccgattcagtcccctctccgtctgccatgtcgccaacctttcctatctggcgtgctcatggacatgcccgggcacgccctcgctgctcagaggcctgctcgttccacctctggccgcgaaccgtatttctgctgaccactcctcgtgcgtgaatatttgccagccttggccattcatatttggactactctgcaccagatatcggactgggaaacctcttgcacatctctaattgtcatctattcgttgggcgcgcgctgttagatcgtgatcataccaatcagaagacaaagcgacgcccttttgagcggcttttcgaacgattctagaccgcgctatatcagcatttctaccgcgcggccagagtgctacactaaattcctctctgcaatccttaagtccattctttacttcctcatccaatttctgcgacagcatttttatggaagcatcgcactctgactcatcatcaaatgcctcaattgcgtgcgttcgccattcacggcgcgtattatcgtagccgtaatgaagtattacccaccgatccacagaatcatcgttaggatctacaactgtcatgaatggcccaactctcgctctggtgtattctcaattgcagttcagtgactttacttgaccagtcccggatttagtagacgtagacggagagtaccccgccgggaacttgactgacatcactgctgtaccgtactgctttcccgggtggcaaccatcgtaagcagcatttgccgtgacgtacctagtgctctttctctgagtgccggtaatcgccttatatggtacaggtgggtgaatcgtagccgttacggctaccgatgacacgtttgcatcacatgaagctgtggcgacataattagttgtcccattgacatgatgagagtcgtggacatactgtcgaggatcgagagtgcaggttattgttgacgccgttgttctggtaccagctgctttcgagctctttgttgcagttacagtctgcggccctgaaggttttactgacgcgactgatgtgttcgcgtgttttgcggcagtgctttgatttggttgtgcttgtgtagcagttgctgatgtcgccagtgatgcccccattaccatagctgtgattatggcgtagtctttacgcttcattgcgcccccaaataagcatgttagtttgctattttgaataggaaacgagacatcgccatgacttgtcaagggcagaagtagaaagaatcggggggtatcaagaaagatgtgctttcatcaggacgaaagcggatgggtccgttcgacttggtgacgaatgatccggccttgcgtcgcggagaccaggccggcgagtttgtcgagcagggccgccgtggcctcatcgtcgggcacatcactaaagggacgaacaaccatgacggctagggccagaaacgaccggaactgaatcgcatgtggacccccatctggcaccaggcacacacctaccgaccggaaaccctgcaccctgtcgctcccagttcacctcctaatatgcgcctatagtctgtgctagtagacattattttgtgtgttgtttcccatctggcatgtctggccccggacccgccgcgacacgcggtggtggataacagaccaggacccccggaccatagagaccagggggacgagacagtcccccggtgaggatgtctcgatgtgcagatcaggaacagaatcgccgggcacgacccggcgccggtgccggtgcagtgaacccgtggcccatcgactccacgaacgaacgtctcgccttcctcaactggtgttggcggcaaggctactcagcagccatcgtggaaacgatggacgccgcgggagcctacgaccacctcgacgacgaccagaccagcaaccagcacgactaacgccgctcccagcacgggggaaggcggcgcaccaggtgcgccgccttcccccgtgctggtgtctcgtcggcttactggtgggggtcgtaggggaacccgtaggtgtgttccagggccttgcggagaaggtcgttcatagttgtgtgttcggcgacggccttcatcttcagcgccgtgtgggtggcggtgggtagcttgacgttgaacgcggtgatcggggtcttggccgactggaaggtttcagagacactggctccctggctggccgccatttggtcggcgtaacggctggctttgtcggcggcggtgggtttgcggttcttactcacttcagcatctccttgattcggtcggcaacctgggcgaactctcctagatctgttggccgggttccgatggcttgccgataggcgacccgtcgatgaacctccgcatcgagaacgtctaggccctcaacggcggcggccccctcgtgggcatcacggtattgcctggtccaatcggctttgttgaagagcagggcccggcgtgtgccgtgggccacctggtaggtcattagcgctcggtccatgtccaggtcccccgactcggtcgggatgatgaccacatcggcgatgtcgagggctgcggtgatcgtctgagagtcaccggggggagtgtcgatgatgacaaggtcggcgtcgatgtcacggcagcgcctgacgataggggcattagccgggcggacctcgaagcccagcgggtcaccagtctcgaaagcgtcggtagcccatgacgtcgccgatccttgcgggtcggcgtcaagcaagatgactcggtactgagctgctaaggccgttgccaggtagaccgccgtggtcgttttcccgaccccgcccttggtgttgacaatagaaatactacgcataaatacatcattacacatgtgcatcgatgtatctgtatatatgtgtatcggcgtgttgtgagggaaaacccgggccacatacaacgatcccccagccaccacagccgggggatctctcagtaaagccagcaactcccacagaagttgcacccccacgatacccaccacatccgtgtcaagcccccacaacacccaccagcgccctaggcttcccccatgaacattgacatggacacaccaaccgaaaccgaagccgacaccttcgatgccgtcctcgccgacattaaccacatcaaccgcctcaccgccgacgaaatcgagtgctactccatgggagcctgtctcctcctcctcaaccaccaccccttctccgaactccgccaacactgggccgacaaccccaccgacgaaaccacgtggaccctctacggggccatcatcgccgcctccaccctggacccccacctcagcatcgacgccctagcccgcctctaccagctccccctcgacctcgtgacccaagccctcaccgtctaagcgtcgatgagcgggggagaggtagcgcactatcggctaaggaaccccacaaacaccaaacccttgtcactgggaagggtttggtgttatgctggtctcacaactcaacagaggaggtgagacatgggaaatgagtaccagaagtcgctcaaagtcctgttcaagaaactggaatctgagcaaggagcccgcatcgagacccggcgcaaaggatggatgatctacccgccggatacgtcacgatcagcggtcatgatccacaagactccatcagatcgcagagcatgggccaacatgctttccgaactgagacgctcaggattcaccgtctaactcagtgaagggggctggagctccagccccctttcaaccacctcccccggacaccacacaagaaaaggagaacatgatgtggcacgttcggttgtcgcttcgcgcaatcagcgaggacatgctgttcgacgccctggacaccctcgaccccttatccccggtggccacactgggccccgatgagcacaccggatcattggcggtgttcgtcgaggctgactcactgacagacgccatcgagactgcccgcacagccatcaccaacgcatgcaacaccgccaccataaccggcgtagaagcccgccccgaagacgaatgcttcgcagacgttgaccggcccctgttcccgccagtggtcggatacaccgaaatcgctgaaaccgcaggactctcacgtcagcgcatccgccagctcgcaggcaccgccgggttccccgcacctgtcatcaagaccgcggccggcccgctgtttcccaaagccgccgccgagcagtgggcgcggacacgccagcctaaggcaggccgcccaaaactccagaccaccacctcataacacatcccgtgtgctgaacctgtt

SEQ ID NO: 192 - DNA, 3927 bp, Propionibacterium acnes
ttggtattggtaggcgatggtgtcaccggttttgttgcggatgacgtcgaagccttcgatgtcggaggggatgtcgtcggcgtcgtagacgacggtggtggtgacggggttggaggccgacatttggccgatggtcacgcgcagcatgtttttcaacgcggaggtgaggattgtcgtggcggtggggttcttgtctgcccagcgtttctcggcgatgtcgatcatgtcttggatggttttgacccatcctcggatgggatcgactttggtcagtttgatccctccaaggaactcgatgggcttagtaacgggcccgtcaggaccgaattcggtgtcccagccttcgtcgatggctagtttcagttcggcggcgtcaacccatgtttcgtgggtggtgccgggcacgttgggccaaaaccatcctgctcgtcctttggtgcgtttgaccggtagtaggccgatgtcgtcccaccaggatggcacggtgaagcggatgtggtagcgggccgggtgccaggggttgttggtgaacaggtcgtgagcttcggtggcgctgagcagagtggcgggtgcggcaccgatctctccggtcactgatccggcatacatgaatcggccgtcgatgtacacgaagttagggatagggccggcaggcacggtggggcgccaaccttgttcgcggtcctcggggttgccgtcgtcgacgcatagttcgtagcggtgctgaggggaggtgtgttggatgagtgcgcccagttcggggtccatcggctccatgcgataggactcgggggtccgtagcttccagaggttgattccttctgctccggggcggtccatgagggcccagtcgcggtcgattctggtggcgatgatgtgggttaattcgcgccatgcccagcgggcctggattggggtgagggtctggccagggaaccattcatcagcgaccagaatgtcgaggttgcggtcggtttctttgtgggtgaaccggcctcgggcgggccgcccggacagcatgaacaggccccgcacgtgccagtcctggttgaactcgcgggtgtgagcgggggtgtcaggcagcagccaggattgaggctggtcggggatgttaccgcagacgatcaggcgtcgggcgttgtggtgtagcgcggttgttagcaggtctgacagggtcgcgtgcttggtgcgccgcccccctagcactggcaggatctcgtttccggccgcgtcgactccccgggcggtgtcgatgtctagccacactgtttcggggtcggggggccgatgtggggcgggacggcgctgctcctggtcgtctctcatggtttcctcctttgggccagggagcggccggcgtcgagggcgttcatgcgctcgcgttgttcttcgcgtagttggtagacccggcctcgtgacactcctgctgcctcggcgatggtggtggccggcaggtggccgatggcggcagcgtcggcaaggacgtcacgccaggccaggtcaatggttcccagctgggctagagcttcgtcgcggcggcgggtggcatcagccactacggaggcccaccctgtggggtggatggtcttgacgacgattcggttgtggcggatggggccccatgcatcagcggggacttgccagccgtgattggcggcggactcggtgatcttgaggcgtcgctcaggtgcgcgggtgcgggcagtgacgtcggtgttccaggtctggactggtacccacgtcccctctcggatgcgttcgatgacgcacgtggtgacctcgtcggtgactgtgatgaccagacgataatctttcccgtctggggtggttcggtagctgggcatgtcaccctcccctatctgtcaaatgagctagacacagtgtctatttaatttgacgcaaagtcaagtgcattagacgcctttgtgtggatccgccccaccagacaaacactcgcgcctcatgacccgccgcgaagccttaacgaaaccaaaccgcttatagaaccgctccgcagcgctccccgagggctttagctccaaggtaagaccttgctcgtcggcccattggcagacttgtgtgaggatctgtgagccgtagccctgatttcggggggcggcatgcacgcacatcagcatgtgaccatgacggcgggtcggcgggctgacataagccccaccacgccagtccggtgtgatctgccaacttcgccatgccgcagcgcgccagcggcgggcctcggtagccaccatgatcaccatgatgatggacagggttacgacgccgactatggtcagctcactccagccaggccagttcccggagatgatccagcctcccagcgcccagatgatcatggcttccacgcccgccgcaatcgggacgagtggggcagtacggatgcggcctgccatgatctcggtgatctcgctgcgatgccatgacaaggagaattcccacgactcttgaatcatgctgatgtgtgaacggcttcctcggcttcgccctgccatagcttctctagacggcgctcggctagctcgtcggggcacggcgacagcctgccgcactcggagcagaccccgaagtggcgcgagagagtgatgaccggctcatcgggagcatgaaccgattcaacgaccgggtgctgctcatcggtgagtcctgaggcgtgaccaatctcggctagacggaggtgaaccataccgtcgtagtagtcgaggccttcaacgtggaacgggtaggagccgtccgcggtgtggcctgcaaccaggtccccgacttccagctgactggcggtcatggttcgcaccggcggcagcggggtccgggtcgcgttgatcctcatggtctctccttgcttctgcgccttcatagatgaaggtgccacagccggggttgatgtgcggaaccacagccactttttcaataaatccatcaccacggtctcaccccttcccaaatgtgtaaaccgtggtttacgctttaaggcatgatcgaacacacaccgacacccgccgcgcctcgcgtggccatcatttcccctagcgggccaccacggttcttggccgagcctcccagcgccgcgctgcgacgccatggtcggacccgcatgaggtcccttcccctatcccctcacattcgcgcctgggtctccaccagcggccgtaaacccaatcccatagccaccgccctgatctggatgcataccggagccctgctgccggtgtgggacaccgccgttttgactgggcctgccctcggcagacgtgtgcgccctctcagcagtgacgccgaactgacctctcggcggtggctcgaccaggttgccgaccatcccggctttctcgacacccttatcgaggccgcccgcatcaccgatggatggcatcacgcgacgcctccgcacattcaggccccttaccggacccttcatcagtgaacggaggtacaacgacatgaccagcgacattgacattgaccggacccacaaacccgacgaccgcgccgaggctcctctttaccggtcctgggccaggagactcgtgcacgtctccgggatgccctggcgtatcgtcgccgccttggccggggtctcccccacctccatgcaccggcttctattcggccgcaacggtcgacccgtggaatggatcggcatcaatgatgctcgcgccctgatggatatcggcatcgatgatctcgcctcagcgtccaccgaccgtatcccggcccgcgaatcccgcgagctgttggtagccctgcacaccctcggctggaccgatgagcatctaagccgctggctgaccagttccgacctcgacctgaccaccgcccccaaagccctctacgtcactcgactatccgccgcccgcatccaggccacctacgacatgctcatcagccagcccgtccgccgctgcggcc

SEQ ID NO: 193 - DNA, 2076 bp, Propionibacterium acnes
tggcgaaacgatcaggcgagccacgaccatcgccaagctgaatggagagcgagcatgagcaccacccctgccgggttcgacttcgacgctctggccgagtgggccgagagcgatgaggcgacccacaccccgcaaaccagccccgtgttccggggcaaggacgccgcgcgcgccagccgcgcattcctcggccgaggacggcccaccctcggctcagaccacgccaccggcgagggccggtcgccccgccgtcaggtacggctcgacgcacgcaccaacgcgcgactcgacgcctacgcagccgcaaccggcaccagcgcctcccagatcatccgcgacgccctcgctgactacctgcccgcctgatcccaccccaatccactcgggcgcctgtcagtgccccctcttctgggtggtggtccggggcgtcaccgccccggaccagttgggtagtcatctcagttgaaataagcgattagtgatacgcccctcatgctttccggtgctgtcatgagcgtctgacaacagcgacacctcggggcagccgacggacagtcctctggctgccgctctgatcccatgcccacggcacgaaggtgtcggacagctcggtctcgtcatgtgcccaaatagcgtcgtgggcctgtcgccaagcttctcgggagccccacacgggcacgaccgggccacaccggtgtcctggtctccagtgtcgcgacactgtcgatttcggtacgtgcaatgcggcggcggtttgacggatcgacatcccagactcccgcgcgtcccagatcgccatgtggagagtatttgcctccagtgcggccgccacacttgcacgctctcgcgcacgctcgaatgcccgcctagtgctctcaaatgtcgtcacgacgcctccccctgaaaatactcagggtgtcccacggtgggacaccctgagtatttcataccccaactcgcctcaccacacgtcgacctcgacaccgatcaagcgacccgtatcagcgacattgccgtaccgctgccccgcctggtcctccagccacgacaacgcatcccgaaacagcccgacgtcttccaaagctaaaccacagtcgtagccgcccttgtcccccaaccgcacaatctggcgctcccggtggcctccctcgtcgacctcgatccacagtttcgcgtgcatccgctggcctcggccctctgacaggatctcggtgagcaggtcggacgcctgccctcgcgcatcctcgttactgcgggggaattggagtatgtgggaggaacggtggtggggcaggtttgtgacctcgtgacgcagcaggttgcgcttgtgcatctgccgttcgagacgctcgggctgacctgttgacggggttgagccgtggcgccgcttcctcggcggggtctcgatccgttgctcttccggcggttcggcgtcaggttgtggtgcgcgatctcccctaggacgggggggctcgccacctatatccgagggacgatgagacggccttccacgcttgctgcgcactttcgcagcccgccccttgcggtcacatcgacgcggcggcggagtgacgtcctcaccgcgcgctaactgcgtcaacgccgccaccaggttggtgcccggtttcagccctttcagcacgaaccgcaccaggcgggggtctcggccgattcgtcgggcaatctcggcttggctccacccttcggctaacagggtgcgcaacaagtcttgggcccggttatcacgctcagtcactggtcgcctcctcggggagtcctgcctgctcggcctgctctgatagagcagcccgttccgatccggtctggggcgctttcaggggaccgggtaggacacctttgacacgcagtcgcccgtccttgccgtcgtcgccgcccccctgggccacagggagcgcccaggggggcacgttgctggtgtagatggcgtcgccgtggatagccagcagggtgcgggagttcatgcgtagtgctcctcccttggttgtggcgttttttccggtggtggggtcggcgatgggtgtgttgagggtgcgtacgcgggacagggcccagata

SEQ ID NO: 194 - DNA, 13067 bp, Propionibacterium acnes
ccgaaacgttccagcccgccctgttcgagctagccgactgcgcatgagaccccacacaaacatggttgaatcgaagggctcagccagcagccagttaccaggagtccccgtgcgtctataccgcgctgttcttacccacaccgacatccagatcaccgtccgcatctggagcaccaccgaccacgactggacctggactcccctcgacacctggacccccgacccgaccccgaccacaccagcccaactggccgacgaactccaccgacacggatggaccacccccgaggaccccaccaccctcaccaaggtgactgtgatccccgagaactggcaggccctcgtcgaccacgccctcgctgcccgaaaccaccaagccaaccagctgcgcgtcgccgagaacatcctcaccgacatcctcggcgacgccgccgacgccggcctgtctgtcaccgctctcgcccgcacgaccggactatcccgagtcgccgtctacaaacgcagcgccaaaaccatcgactccatgagacacgccacccaggccggcggaatcctcaccccctcctgtctcacccacgctgagagaacagcgctcggcctgcccgacgagtaacccatcgtttacatcctcgactggtccctgcgaccagtgaaccgtgcccccactgcgcccacaatgatcagcacacccacggcgatcatcaggtgggcagcactaactgatcccaacgaaccaagatcaaacaagccctgcccgggagcgtcgagcagtccgtgggcgcgaagccatgctccgagattgccaatgattttggggatcatcttgttcagtagggctatccctccgatgccgacaacgaggaagacgaggatttcttcgcctgcgttgtttcttcctgtgtttgcgatcatgctgccttctcggggtggatggccagccagctgatgaggttgtcggtgatctgccctgagatttggatcagttcgacttgcccggcctgccatgcccgtgatgtgccggccagcaatgatgctgggacccctactgcgcggccacgggatgcaacctcagccaaggcggcgcgtaactcctcgacggtgctttcgatgtaccaactgccgtcagtactagtctcagcggcatcggtggtagcgataagagcatcggtgaggtcgtcgacggcgcggtccagatcagcgatgtccggtagggctacaggagtcatggtgtgtcttccttctagggtgccttcactggtgaagggtccctagccccggccgatgtgcggtgctgtgggaaaaatgcttcccattggtccgtcttagttaggaaacttggcctaagtgctgtcgagggtcgcgtgttcgtgaccggttcgaagacactgccgccttgccttcttgcccgtggcgcttccgagatggggtcagtgggcgatggctaggccgatgagggcgccgctgcacaggctgggcgcccagggaaggaatcgggtggtgtggtgtcggaaccgatcgatgagggcatatagggcgatcagagtcagcccggcgatgaccgtggcgtggatcgtgtcgatgccggttgctgcggccggggctgcccacagcggtgtgatgcgcacatcagagaagccgaatccgcctcgggagatgacccagacgatcatccacgctgcgaagatgatggtggtagcgatgacagcacgtatcgccgcagtatggttcgcgagagcgatcatggccacagccccgatccatccaacccagccggtccaggcgagggctgccggtatccatgtggtgatggcgtcaatgacggcaacccatgccccgatggtggctagcagagcccaggccggccaggtgggtgctggggcccacgctacggcggcgatcatggttgtcgcagatgcagcacagacagcgatcaagcttcggagactgtaggtgtcgcggtaggcgatcttgtcggggctggcggtagctggttctggcaggatgtgggtgagggcaggccaccctgcggccgcaatagccgcgacggcgaccacccacacaatctgttgcatgggtctcatcatggcccatcaacgccgaaaatgggtggccgacatggggtcactcgtagaggggatcgaggggtgtgcgggcgagcatggcttcctgtgtgccgagcatgagggtgccagagtcgtcgccggccgattcccagtcgacgatgacctggtcgccgtcaacgctggattcggcgatggtcacccattgcccgtccatgtcgatgagcatcccggcggccagctctgtggcggcaaccgggtgggctgggctgtagaggaggtcgatgtcgcgggcagggtcgtcgggttcttcggttacctcgggtggggtcgatctggctgtctcggtgtcgtcggccaggtcggctcccaggatgcgctcccattcggggctggttttcttgcccgctgaggccatcgtctcgtcgatctgttcgtcagtgggccacacaaatttctttttggtccaggtcgtggtgtcgggtcgcagctgatccagcagttccaggtcttgcggggagtgggccttgcgggggtcgggggtgtagaagaattggacttccttgggggctgattcgccggataggtaggtgccgcggccgcgtttgccgaacgggatgcccacgccgacgtgttcggagccgaacatcatgcgggctccgtcagcggacaggggtccggtggcggcacgcccggagaagttgtctcggatttcgccgcccaggaactcggcgtcggggcgttgggtccccagatcgacgtggatacggcaggcggctgccatgcgcagcagggagccgatccagccgaaaacggggcattctccgggcatcccagagaccttgatcgttgaccaccagtttttcgcgttgccgtagaactggcggtactcgtcgatgaggaccagcacgcgggtgaagtcggtctcgcgggccccttcttcttcgatgcggcggtagcggtcctccatgagagaccacagccagtggatgagggcgacctggtcggggacggtagtggcgaccatctcgatgttgggccactcccgcaggcccaggtactcgatgcgtttagggtcgatgacgaagacgcgccagttgcggcgggcaccctcgacggcgtcgccgatcatggacaccgtttttccggtacgggtgcggccggccttgagctggtgggccatgacaccggagatgtcccagaaacaggtgttgccgtcctcgtcgacggcctgggggattttctcccagtctggggagtctgggcccggaagggccacgggtcggggcaccatcgagggcagggggtggcggcgggtgacggtgatggtgtcgtgttccaggtcgaagtcgctgcgccactggccgagcatcatcgccgaggtcaccgcggccaggcgcaattggatgttcgggctggacaaatgggcgccacgttggtggtgaatggtgaagccgtccaggttcccccgatcggttttccaggaatcgacggtgaccgccgacccatagatctgagtggctacttctttagcccgttccttgtctcggtccagatcggttttgtcagggtcaggggtcggggcgcggtattgcaggacgaaccggccggccgggatcgttgcggatgtcaccgtgaactctgccggcgaccaggcagccgcggccgcctgggtgagggccattggcatggtctcgacggcagcctcctcgggggggatggtgagggtcaggcgtcgcggatgcgtcttcttgcgattccatgtgactttctgcctcaccggcaccttcgccgccgactgaatggctaggcgagctgattcggcagtttcggtacgccggccagcgcgtagcgcccgtcgtgcgtgaaggctgcccaccacagcacagcccatacacggcagccaccagcgcggatcagcggctgctgcatagcccccggtagctagtaccgcacctgaccagccggccgcgatacttttccacgccggtttcgcgccaccaggaccagcgttatggacggtctgcttcgaggctgcggagggacgagacagcggagtgctggtcatgccgcggcctccttgtggcaggtcatttcacaggcatgccggccagcgatgatgccgtggcgcaccgccccggtagccgcatagaccgcgcacaactcaaacacggggcacccatcgcaggccgccgggttcatgctttctttgtcccacgatggtgggtcatcggtgcacggcacggccaggccatcctgttgagcggcgctgatagcggtgaataggcgcagctgggcgcgaacttggtctggggtcaggttgacggtgcgggctacacgcatggggttccttcctcttcaccagtgaaggttccctagacccggccgatgtgcggagggatttcagtgttttatcgaggtgaccagccagccggtctgcgctgcgggttcaggtaccagggtcagatgcagcatggtgtggtcggctaggggcacggcgaccaggggcccgtcggcgctcgccccggtgagggtgggagttccggccacggtggtggcgggaatctggttgggtttcgcggccatcagggagcccatgagggtcggggcggcgatctggacgagggcgactttgcgggcggcgggatcgcgggtcaaccagccgcgggtgaaggtgagcgcagccgacgtgatatcggggctcagcggggctggtgtggcggcggggtgggccgttgaggagggccatacgcgcggtagcgctggcgacatcgagcgggtcggagtggggtcaggtgtggggcttagggtccgatgtggcgatggggctaccgccccggtggtgggagacgagactggttgggggtggtgttgaggacgtgggatcagggtgaaggcagccaaactggccgggatgaggatgacggccgcgccgacacttcggagcgaggtcatgtgacgatccttcggtagctcgacgggttgccgtagatcttttccacgttgatgccactatgtgggttgtcggcgctaaccatttggcctccaccgatgtagacggccacgtggtgggcagggcttccccagaggatgaggtcgccgactttgagctggtcacgggccaccgcggtgccgactttctgctggtcggcggcggtgcggggaaggctaatgccgatacgccggtacagcgccgaggtcaggcctgagcagtcgtagccgccatcggctttgccgttgccaccccacacgtaggcgtaggagttgttgtcggcgatcgatttggcccatgccacggcttcggccaggttcttcgacacaccggtctcgttagcggccccggtggcacagttgtttgacaggtgccctgtagtagtggatcccactatttgtttggccatggtttcccatttggcgtaggcatcgggcagggctgagccttgcactgcctgagctgcctgcgtcagcggcatcttctgccagtcagcgatgtcgactaaaccgggaatgtggaatccagggccgccggccgatccggggccagcgtaggtgatggtgtggcctttcaagaacgcctcggtggcgtaggcatcattgttgacctgatccagagtcccgtaccagcccggcaggatgcgctgctgaaaggggccggcgtcaccgtcaccgttagccttcgctgaggtagggtcggccccaagatctgattcttgtttggcggtcataatagcgatgaccgctgcctgggtaggcagtttgtcacgctggaccacagtgacgatggtggtcacgagctgcttctgcctggccgtgaggcctccggcacccacagtgcctccggtgacggtacccacgcaagcatccccgccgacactgccaccgccgccgccagagttgtcgtcgagggccccagagcctactgacagcagcggcacaatgatcacggtcgcgggcaagaccgccaggcccgccagcatcagcactgctgcactcaccacggcgatcacgtgagatgctttcaacgctgcccacctttcgctggtttgagggggcgacgcctgctggtacgcacaggcttggttggtccagtccgccgttggttggcaggcctgggtttgatcggcttgctgggacccggtttgggctccggagtcttaggctccggcttcacatgcctaggcacttcggctgcggtgggaggagtcagcacgtggcgtaccggcttggtgaccttctgggcacccgaaacaaccggcttagacaccaccttggcacctttgaccaccggtgcggctgccttcgcgccggccttcttgactgcacgatgcgctttgatagccccggcctcggcccggccaaccctgctagcagtagcatcgagggctctgtggcccgtcgttgccctcaccggtgcatccttgccctggcgggtctgcttagcgatcgccgacatgccgcctcgcaatgccgaaacatgattgtgggcgtgggcgatcgccgacatgccggccgtcgcgatttttgactggccctgcggggcccctgccccagcacgaatctgctggtaagccgccgacgtgccacgagcacccgccgccattcgcgccaccttcgcagccctagtcactcccgtcgacacgccacccgtggctaccgcagcagcacccgagaccacagtcgaggccatccgccttcgacccaatccggtgagcttgcgaccaccgctgcgcaccatccggcgagcaccccgcccagcccactggccaatcgccgacgccccttcggaacgcttgctgcgcatccaatcgttgatcttgtccctcagccccttctcgcccttgtgacgacgccacatggacatcaagaacccgataatccccacgagctcgagcatgttgacaaccatgaccttgatggcgacatcaccgtcagaggcgaaaaccgacttgatgatgagcatgaccacacccaacatcaccatcgacccgacaatgccgatcatcgagtacaagatcgaacacagatcccggatgagcggatctgtgcggccagggatagcccgcaacacgttgagcatcgacatgaacgccgaccacaccaacttgcacacgtagaaccagcacatgcccgcgaacaccagcaggaccacagccaaacccgccaccgtcgacgagtaaaagaagaaccccaccaaccacgaaccatccgcaatatcgccggcgtaatccgacaacccctcatcacagtcaccaaggtcgtcgcgagcatccgagacgtcatcgtaagggccacccttgagcacctcgatgtacttgtcgtggcacttcgcatcaataatgcggccatagttgagctgctgatgaaccggcgccacgaacgagtccacaatgatcgccgacagcttcggatccttcgagtctcccgtcgaggtcatgtcatcaggaatctcgacctcaccagcggtcgccgtcgcaggatcaaccgaactggtaatcatatgagacagcgccacaccgaactgctgggtgcgagccagcggagtagccaacgtcgtcgtatcgcctgcgaacttcgccaccggggccgccaagaaacccaacgccagcgccgcagcaatcgccgcacgcgcacccgtagcccacgcccctgccgtacgtcccctcatcatcttgacgaccacgcccacaccggcgcacgtcgtcagcaacgtcaacaccgttccaccccagctgtccgctcccagcggggccaaaaccttgtcgtggatgtcgttctgtaaccccaccagcggtccggtaatccacccgacccagctcatcgccacggtccagtccaacaaccggcacaacagggcaatgaccatcaggtacgtgttccaacacatgccaataatggaggcccacatagccttcagcggggccgtaacgccaccatcgtccatcgacatctggtactgaaacaagtgaataccgttggagtcagtcacattgaaaccgtcacccatccagcccagccccgggcccgatgccatggcaggcacactgctcagcgccaccaccagaaccagcgtggtgacgatgatacggaaccgccgctccccggccccggggcggcgtggatgacggctcacgctgtctcctggtcgtgctcgggcgggttggagctggcggcttcgcggtggggagcgtaggcaggtctcagtagtcgaatttcaccgacgttgccgtgttggtcggcgtacaggccacaaccggggcctccggggttgagggcaatcttgaccaggtcagcgaactcttcaggggacgttttagggtccacgcccaggaactcgacacctttctgggcgaggttgatgttgtcgcacagcaacacgatgcgatgctgaatgaggttgcggacggtctcgttggggtaatcggcctcggggtcgtgggagccggtgataagccaggcattggctcggcgggattcgcgcacgtactcgtcaatggcgtgggaggcttccggcgaggacgacatgtgatgaaactcgtcaacaatgaaagcggcgtcgcgggcccggtcgctgaagcacaccaggcgagccagacgggcaatgagcgcgtagagggctcggccaaacaccttgtgcgggggcagctgccgaaacagatgttctgacagcatctcctcggcgttaggaagagcgatgccacaagtgccaatgatgaggatgtcggcactcaggtcggcgggaggaaggtccgggtcaaagatggccgaagctagggaggccgagttctcgatgtcagcgaacacggcaatcctgtcagcgatcgcggtggcctcgggaaggtcgcactcctcggccaggtggcgggccaaacgcccacacgaggtgatctggtggtcacgcatgtaggccggtttgaggaccttggccagcgtggtcccggccacaccgatggtctccaagttaagcaaggtcagcaagaacgactgggcgacctgcccggccatctccgggggaaggatgcgcagcgggtccagcgacagcttggggtgggccgtgtcgacgatctggcgtctaaccccgtcgatagagttgacaaaggttacccactcccgctcatcggagttgtcggtggcaataatgcgcccgccccgggccgcgatggctgcgcacagccgcttctcggccatcgtcttgcccgcgcccatcttgccgatgaacgccaccgtgttgcctttctgatcctgagtgtcggcatgcaaatcgaggtaggccagcgactgcaacggggagcctgtgaccacagccaacgggatgccggtggtacggcccaaccggtactcaaccaccgggatagatgcggcgaacgcggaggcgtgagtcagctgacggtaggcgttaagcgaggaggagaaccggccaccgggccgggcagcccacagcaagtcctcctgacggcccacgggacgcacccacgtgaagtcaccgaacaccggatcattgacgaacgctcctgccagctcctcggtggtctcaaagtcaggagacgagacagtgacggtgataagagcctggatctcgacctcacgctcatcggcggccagctcggcgttgtagtcgacgagcacctgagcggaatgctcgatagacatgagggtcgaagcctgggtcatctcaccgccctcgacgttgtcgagctgatcgaccgtttgacggatagcccgctgatttttctgcatcgcagcgtgacgggtccgggccactccccggatcgccacgtcgaccggcacgccagtgtcgtcgatacggcccaaaaactcgtaggcaggccacgtcatcgtgcggggcaccttacccagcacgatatgggactggtagacggtctcgccggtgtcggcaccgattttgaggacgcgacgattccacgcctgagccgtccgggacatgtgggagactcgcttgtcatcctcgctggccagcaggtcggaggtcgcggcctcatcgatgaccaactcccccagcgcggcacgtccaacctcatccatgagggcgattccctcgccaggggcatcatcacgcaaccgggtcgggtggcctgacaggtgctgccgaagccagatctgttcatcaacggtgaccgggcggggttggaacgctgccggcagtttcgcaccgaattccttagcctgacggagggcccactcccgtgcgacacggccaggagcggtggtcatgagtccggcggcttcggtgattttgttgagggcggcggtccaggcggtgtgggtgcgtattttctggtcttggttgagtttgatcgataggaaccacacgcgccggcctagggattcggtttcaggctggtcgagggtggcgtcgatttcgtcggcccacacggggtgttcgctcaggtcgaggccggcggccatggcgtcgacgatttctgtggggtcggtccaggtgagggctccgttgaggcagaactcgtggcgggcgaggtggcggaataggtcgcggtgagctgcggcgacggtgagggaggcgttctcggtgacgggtcgctggaggggagtgagtcgccaggtggcccagatgtcgccggtggaggtccagacgaggttgtcgaagaggaaccgttcggggatggacatcatgactccttttcggcggcggcgaggaaggcttccaggccgctgcggcgtacagcgttcccggtagggtgcaggggttttctgggggtgggttcagatttcgaatgtgggaggggtttgtggatggtatcggtgtcctcggcgagggcttggtcgagcaggcaggtggccggggtgtcggtagtctcgtccagctcgtcgatcatctcgtcgaggaggttgggggtggtggatgcggcccacacaggtgggatagccggtgcgggtcgaggcggtgtggggaggaggagtttggtttggccccagaggggtgtgtgggtcatgccggcgggagtggtggcggcgtgagtggtcacacgccaccagcccgccagccatgccagaggtgaccaggtccagtcgatgcgaccaacaacgaactgggcgagccatccggcagccagcgcgaaaatgaaaccgcggatggtcatgcccccgtcgataattttgaagcccatcatcgcggcaggaactacgccgccgacagcgagcacctgatagatcgtgtagggcccgccaggaatccttcgacctgaggaatccttaccgataatgcggggctgctggcgggcctcggtgtgccactgaatatccacgatcagctcttgcccaatccttgcatcatctgtccgaagaattggatcgcgttaccttcgataagccagtgcgccataccacacacaaacagcatggagacgatcttggccaggctcataccgtgtttgaagatgttgaacgcggcaatgcccacgactacgaccatggcgacggctcgcaccgcggactgaccttcacctgccttgatcgtcgtccattcgaagaggttctgcgattccagtggcagcaggaggaattgatcgagcatgagaggttttcctttcaggaagccgaccgggatggtcccggtactgacgggctggacggcacgggtgtgccggccaggggcagaaggcgtgacggctggtcgagggaggcaacctcccagcggcctgcacggctgacaagagtcaggccgtactggctggtccgggtagtggattcgtcgccggtgggctggcatgtcacggtcaccgtgacggtaatcttctgccggtctgagggggtggggacctcgtcaggtcccaccacatgagtggttttcactgatacgcatggggctgggtcaaccgcggtgaaagcggtccctgggctgctccatctcgacaggtcagtattcccggtcagcatggcggttaggaagcctgaagaggcttgggcggccgggtcggcggtgcgaagctccgaggtgtctagggtgggggccgaggccggtgcaggcatggggatctgtccaggtagacgcaaggcgatggccttgccgttggaatcgacgtggaccgggactgaccaggcctgtccgctcccggattggccgcccatggtgaccacggtgacctgccacaggctcggatcagacggggagacggtagcgtcataggcggtgacggtggtgggcgctggaccaggtttgcggggcatgcgcgcatcggtgatcttggccgccaccaggtgttccagattgtccaagtgcccggagtcagaggtcagcagaagagtagtcacctcgaccgcggtggctgagacgatctgagctgtgcggcggtcgtgatgggtggtgtcagtgctgacagctgtggtgggagcggatgccggggccgccgaacggaccagggcaacggggccgcatgcgactccgcacagcacgagggcaaggaagcctttggtggccatcgatccggtgtggggccagggacccacgttttcctgtgcctgttttttcttggccgaccaacggcgggacttagggttagcggatgcaccttctggggtgcatgctcgtctcaatcgcatcggtcacctccttcactggatgaagggaccaaggaggtgaccgatgtgcggtcgaacccgaaaaagttcaaacttttttctgggtctgcctcaagtacgacagaaggcctgcatcatcacggcgttgtggtagcagatcttgcgtcagcgcaaatgtatgggcctcgtaggagtagctcttaggtgggtcccggtggttgcggccagggcgagggtgtcgggtatgtgtagcgctagtcccgggttcgtggtgtgagggcttttgggtgctgacatgcactacccattgctagacgctgtgctgtggcatggctggacgtctagcagacgggttgacatcacctttaggctggcagcgcccgaggccgcaggccagaggaagcggacagcctaacgattgacgtccccctctcctttccccaacctcctgga

SEQ ID NO: 195 - DNA, 9465 bp, Propionibacterium acnes
tgtgtgggatcagctgtgccgctcccccgacatggcagacagcaccgttgcatgagaactgactgacactgtggcgccgcggaggtctcccgcggcgtccgctggggcgagtgcatgcctgtcagctcatcttttatcgtcatgtttccccttgtcagagcggtctttgcaaagtgacaacgtcaggggtcttgacgacaacatcctcgacaacatcgtggcggtggtctgtgtctcgtcagttcaacgcaccggggaaagaggcaccgctgatgttcaccaccacaaacaccctcaacgatgagtgggaccagattcgcgccactgagatcgattggcatgactgccctgaactgatgcactgcatcgacgttgatgatgtgttggccgtcattcctgccgcccccgacgccatcttgggctacctcattgcccgggctcagggcggtgacgagttggccacccgcactatcatccaagcgttcacaggcaagcttatcttgatgaccacggccaccaaggtgcgccgtactaatgacggcttcaatgatctgttggcgggtctgtgggagacgatcatcacgtacccgttggatcgtcgccctgacaagatcgctgcgaacctcatcctcgacacgttgcaccgggttacccggttctggcgtgctgattcccccgatgaggaagaggctcacggtctggtgcccttccctgacactctcatcgccccagagcccgatgaggacgtcacagctagccaggccatcgccttggcggtggaccgcaactggattaccgaggacctagcccgcctcatgagccatatttactgtgacggtatgactggagctgatgcgggtcgtctgcatggctgcgctccagctacggtgcgatctcgatgccgtgatggtcgggccgtgttgcagcgcaacgccgagacgatcctggccgtctgctgatccctctcttgctcatgcctgccgccaccctacccctacctgctagaaacatagccatgtctccagcaacgcatctagcgtatcttctagcaattgatctagctatgtatatagctgatgatctagctaccatatagctgtgtctccagcccaaaggacagcccaatggcatgcttgccacaggaaggtgcgtcagcctcccgaaatactggaaggagctttaccgtgcaggacatgacctcgaccagaccgattgaccgatccccgttcgaccgcactattgcggtgtggaaccacaaaggcggcacgttcaagacgtccgtcgtggcgaacctgggatacctgttcgccgccggtggcaacaaggtgctgctggtcgacatggacccccaggccaatctcgacattgacttcggtatacccgcgaaagaacgtgaacggggcatgggattagccgaggcgctacgtgaggggacggcccttcccccaccgcagcatctcagcgaaaaccttcacctggtcagtggcggcgctgctctcaacgagttcaccgaccccgcatccttagcggccatcctcgaccgagtcaccaccgcacgctacgacctgctagctcaggcccttgccccgctggcctgggactatgacctcatcttcatcgactccgggccggcacaaactctgctgtcccagaccatccttggagtagcccgctggctggtagtgcccacccgcaccgataacgcctcaatcactggcctcgtcgacgttcaagacgccatcgacggggttgcctcctgcaaccctgaccttcaactactcggcgttgtcctagccggcgtgggggcccgggccacccggatcgccgcagataaacgccacgccatcgacacagtgctgggggcaggaaccgttttcgatgcggtcatccactactccgagaaggtgtccgtgctcgcacgccagcagggcaagaccgtcgccgagctagccaacgagtaccacaacacccagcccgcctacacctacctagctaaaggccagaacatccccaacgtcgccaaggcagccgtcagcatcgaaactgattatctgaggctggccaccgagatcagcgaccgcatgttcaccagcgacgagcaggagcctgatcatgactgacgatccgactccatccgagcagaacaaccccaccagcgacgacatgcgcttggccgaagaatgggccaacagcggccgcacagtgggagccctgccgcgccgtcaacggcctcagcgacccacaccccgcaccaccagccaaccccctgtctcgtcccctgacacaccggctccgaaaaaaccccagaagacccccaccagccagcctggccgtcaacggatcaacgtcaccgtctacgttgtgcccgaactccatgagcggctgcgctcccgatcggcggcgacgggggtgacggtctcggatctggtggtgcatgcgttagcgttcgtcgccgatcatgcgggggaggcgatcgccgatgatctgcgcgtcgagacgggccccggcatgggggccggactgttcgatgtgaccccatcgcggccagtaggggtcgccaaaacccagctgggggtgcgaatgacccgccacaacaaggatggtttggaccagctgacccggacgagtggagcccgtgaccgcagccatcttgtgtctgtcgccgtgcgcgactatctcgactccaaccctgtaaagaaaggccgacatgtccgctgatgaaactcctgccgcccggggtgggcgacgctttgatacgaccgtcaagcccaggcgccgtcccatgcttatcgccgccggtatcgccatcgtgatagtcggcgcgctcctcatcactcagttgattcgctccgcccaaaccgagcatcgcgtgctggaagtccacgccgatgtggctcgcggcgaggtcatccgtgacaccgatctggtatcggtgactgtcggccaggtcgacaacgtatcaacggttcccgcagaccagctcgactcactggtcggcaaacgcgccacggcagatcttcgagccggatcactcttgcctgctggggctatcggcccggccgatgtcgttccagctccgggcaagtcgctggtcgggctgaagctagccgccggacagatccctatcggagaccttgctgtcgggacgaagctgcgcctgatccagacgtcggcacccagcggctcatccaccaccactgatagcagcaccaataccgatggccagtcgtgggaggcaacaatggcgaccggcaccaaaaagaccgagcaggtcaccttgatcaacgccgaagtgaactcgcgtgatgccgcccggatcgcccaactgacgtcacagggccgtatcgccgtagtgaaggatccgatccgatgagcaccattgttttgaccagcgtctcgggagccccaggggtcaccacgacagcgatcgggctgggcagggtctggccacaatcgagcctggtcgtcgaggatgacacccaccacgccatgctggcgggctacctgcgagcctcccagcacgccgaaccgaacctggccgcagtggcgaacctgacgtcgactccaaccaacgcccaaacggtgtgggaatctatcgccagacccctacccaccgatgacccagtcggcgggctgagacgcaaaggcatcctcggcccgcccacgccgtggtctcgcgcaggcatcgacccccgatggggattcatgctggccctgtggcggcaactggaggaggctggcatcgacaccatcatcgatttgggtcgcctagccacaccactgacctcaacgccacacctgatcgccgcacccatcgtcgaggacgccgacatgatcttggtgatgatcgaggcgacactacgcgacatcgccggcgcccgcacgatggtggagggactcgctgagcagatgaacttggccggcgcctaccgacgtctcggactgcttgtccaccgtggcggccaggcccgcggcgtcgccgagttcaatgacaaggagatcacctcggcgttacgactcccggtcatcggggccattacccacgacccggccggagccgcccaactctccgacggggtcgggcagcggttcgacaagtcacgtctggcccactcactatcaaaggtggcggccagcctcgtcgatgccataaacaagcgccacgctgatgacgaggaggatctgtgatggccagttttgctgataatccgttcgacaagctgcgctcccaggatgcggcaagagcttcggtagagcaggagcctgatgccggattagcgtcggagttgttttcgacgtcgtcggggtgggccagctctcagcaggtgtcccaagctcaaccggtgatgacccgttcggagaacgtggattggccggttgtcgcggagctagccagtacggccactgatgaggttgaggctgagatcagcaggtggagttccactcatgatggggtggcgacgctagacattcgccaggccatcgcggagcctgctattgcctcggcggtgtctacgtatgctgaccgacgccagatcgatgtaggggagacctggcctgatctggtacgccagcgataccgcaaggctgtgtgggatcagctgttcgggatggggcggttgcagccgctgttcgaaatcagcgacgccgaaaacatcatcgtggtgggtaaccatgaggtggttgtcgaccacaacgatggttcccggtcaacgctgccgccggtggccgactcggatgccgagctggaatcccagatcgcccggatggcgaggaatgcgaccccgcggcgagccttcgacgccgatcacaccgatgtgacgatcatgcaccaacagaagttccgtatccacgcgatctcttcggaggtgtcgttgcaaccgtcggtggtcatccgccaacatttgctcacccaaatcagtctgggggacctgtcccagcggggaatgatgccggtggaagtggcccggttcctcgatgaggcggtacaagctggcaagtccatcgtggtcgccggcgagcagggggcaggcaagacgacgtttttacgagcgttgatccacgccattccggcgggagcggttcgccacgttggagaccgatcaggagttgttcgctcatctgatgcctggccgggaaaacacgctggtgctgttcgcccgtgatggtaacggcgaggtggatccggcgactggcacccagcacggcgctatcgagatcgcccagctgattcctcctagcctgcgccaggcgttaactagggtcattgtcggtgaggtgcgcggcaatgaggcttcggccatgttccatgctatgcagtcgggtacaggcactatgagcagtatccactccccgcgagcctctgaggtgccgtcccggctagcccaaatgatttcgatgggcccggtctacgatctggatcaggccatgctgcagatcggtcattcgatcgactacatcgtctttgttcgtaagcgtgacctgcctgatgggagccggctgcgatttgttgagcagatccgttcagtctcgcctggtgattcgacaactcccagtcttggcgaggtgtacacggctgactcgtggacaggccagccgttgaccccgctcatgcctggttcggccgccgacgagctgtctcacttcgcccgagacctggattactgcgaggcccactcatgaacactcccgcactaaccagcgccctcatcgtgaccgggttggggctgatcctggccatcgacgggctggtcccggcgccgcctcgacctggtgccccgctgagcccggcccaaaggtgggccaggctcacccaccgtcccacaggagcggccgggcgccgccgggacctgcgctgggggctggctgttctcgtcggcgtcgtgctgtttgtgctcaccgggtgggtcgctgcgctggcgttgggccccatcatcgtgctgctggcccccaccctgctgggggcggccccaccaaccgacatcccgctgatggaggcgctggatcggtgggtgcgtcaggtcgctgcggtgctgccacaggggcgagacatcatcacagcggtgcggatctcacggccgcgggccccgaagctgatcgccgggtcggtggatcaactggtgtcccggttggatggccgtatggagccgagggaggcgttccagcggatggccgacgagctggactcggctgaggctgacgcggtgctggcctcactagcgttggcggccactcacccgcggggagcctcgacaacgttgaaagctattgctggcaacatccaacagcggttgaaagtgctgcggcaggtggaggctgagcggtctaagccgcgtaactcggtgcgccagatcacactggtcacgatcgccatgttcggggggctgctcgtgatcggacggtcgtttctggccccgctggcgacccctcccggtcaggtgctggtggccgtggcggtggtcatgtatgtcatcgcactagtgcagatgtatcggatggcgcggccccgtcgacgcacccggatcatggtcaggaggacccgatgaccattactgctttgtccctgctggccggggccatcgtcactgtcggactgctggtcatcgtggcagcgttccgcccagccccaggccctgacctggttgccgctctggaggtggtgtcgggtcgcacctcaagcgtcgccgagaacgtcgaccagacccggatcgggcggataggtcgcagcgtgacccgcacattccatgtgtcggtgtccccggccatgcgggccgcactgcgactccaaggcacgacccccgaagcgttctacggtcgacgcctgatctgcgcactgatcggggcgatcctgccgtggctgctcaacgcggtagccatcgcggtaggggcgaattccccgaacctactcatcccttcggcgctgtgtgtggcgttagctggcgctggatggatgctgccggcagcacggttgaaggctgcggccgggcccaccaacgacgactcgttcgaagcgctgctggtattcatcgatttggtcgtgctggaacggctcgccaacgaaacctccgtcgacgcgctcaccaatgcggcaaacatgtcggactcgccgctattcgtccagatccgtcaagtcctcaaccgtgcctccctggaaaacgtcgacccgtggaacgggctagaccggctagccgaggacatcaaactgcccgaactcaccgatgtggtctccatcgcccgcctccaaaacgaaggcgcctccctcgtcgacagtttccgggcccgagtcgccgagttacgcgacgcctacctgctgcgcctgcaacaagaatccaccgccatcacccagcggcttggtttgtggacgatcctgcaagccggctcggtcatgctcatcttgctgggggcggccgccctcacactcatcacagccggataaaccgacaccgtgtcgagcccccatatgggccgcgaacctttcataaagatgcctgtaagcaccacaatattgatcacaacctaacaatgaaggagaaatcatgatgaccgatctcgacctggctaaaaaacagatcacctggctggcggcgcacctgcgttcccggatcgttgacgagcgtggcggtggtagctctaccgtggagacactgatttggattggtgtcatcgtggcgctggtgattggtgtgggcgtcggggtgacggcctatatcaggtcgaagatgcctcactgacgacgatgcgtagcaggttcacaactgatcagcgtggcggtggtagcgcgtcggtggggatgctcctgctgatgcctgcgatcatgctgctggcattcggtgggatcgaggtcgggatgtggtgtcacgcccatcagtcgaccatcgcggcagcccaaagcgccgcggaagctcagcgtgtcgtccatccggtcccggggtcggcacaggaggcagcctcgcagatcactagtcatggcggggtgcgtgatacccggatatcggtcagtgatgacggggccactgtcacggtgaccgtctcaggtcgggccccatcgatgctggggctgcatcttccggctgtgtcgtcgacagcgtcgatgcccaaggagcgcctgtcgtgaggcgaagtgagcgcggcggagcaagtctaagcgtcgaggtgctcatgtgggcgccgatcgcgctggtgatcatcgggtttgttgtgggtatcggccggatgtcgatggcccaggacgcggtgagtggcgcggctggtgctgcggcccgtgcggcgtcgttggagcgtgatggacagtcggctcagtctgcggcgcagcaggcggcgtcggcgaacctgtcgtccggtgggctggcatgtgcgccgagtgtgagcgtggacacgtcagtgtttgcccgtcctgccgggcaggcgggcacggttcacgccacggtcacgtgtgtcacctcgctgggtcttggattcgggtcccggacggtgcacgcaacggggtctgccccggtagacacctatcgggaaaggagaggctgagatggcccgcgatgagcgtggtggcggctcggtgtcggtgtggatgctgctcatggtgccagtaattctggtcatggccggcctggtttttgacgggtcccgtcagatatcggcaacccaggcggcccaggacgcggcggttgcggcatcccgcgccggaactgatgcggcagcgacaccgcagctagctggccacgacggggcggccgtagcagtccaagcggcccgccaggcactatctgctgccggggtggacgggtcggtgcaggaggacgggtcgaccatcacggtgaccacgtctcaaagtcggccgacagtgttcctgtcagcgatcggaatcagccaggtaagggggcatgggcaggcccatgctcagcttgtgggaccgggagaacgcccatgacagtgatacgtcgtatcggtgccctggtggcactgctggtggtgatagccggcttacccgccgggctcgtggccgcaggcgccccgctagtaccctcgggcctgtcatgggcccatgtgcggcatctgttggttaccccagacatgaccgggtcggtgctggtgtggctggtcagcctcatcggctggatcgggtgggcatggttcgccctggccgtcgcagccgaagcggtgacgatgctctcaaggcagcggctgcactggcacatgcccggccctcgcctagtgcgccgagtggcagccggtctcctcattgccgcgttcgcggccgcaccggcagccacaagcacggctcacgccgccgagaccacccatgtggcggtcgccgcccaggctggaccggcacacgcggccggcacccaggacagccccgccaccacctctcaggccccggacgcctccaccactccgaaaatctggaagacctacacggtgcgggccaacgactacctgtggaagatcgccgagcactactacggt

SEQ ID NO: 196 - DNA, 3127 bp, Propionibacterium acnes
ttggtattggtaggcgatggtgtcaccggttttgttgcggatgacgtcgaagccttcgatgtcggaggggatgtcgtcggcgtcgtagacgacggtggtggtgacggggttggaggccgacatttggccgatggtcacgcgcagcatgtttttcaacgcggaggtgaggattgtcgtggcggtggggtttttgtctgcccagcgtttctcggcgatgtcgatcatgtcttggatggttttgacccatcctcggatgggatcgactttggtcagtttgatcccttcgaggaactcgatgggctgggtgatgggcccatcaggaccgaattcagtgtcccagccttcgtcgatggctagtttcagttcggcggcgtcaacccatgtttcgtgggtggtgccgggcacgttgggccaaaaccatcctgctcgtcctttggtgcgtttgaccggtagtaggccgatgtcgtcccaccaggatggcacggtgaagcggatgtggtagcgggccgggtgccaggggttgttggtgaacaggtcgcgggcttcggtggcgctgagcagagtggcgggtgcggcaccgatctctccggtcactgatccggcatacatgaatcggccgtcgatgtacacgaagttagggatagggccggcaggcacggtggggcgccaaccttgttcgcggtcctcggggttgccgtcgtcgacgcatagttcgtagcggtgctgaggggaggtgtgttggatgagtgcgcccagttcggggtccatcggctccatgcgataggactcgggggtccgtagcttccagaggttgattccttctgctccggggcggtccatgagggcccagtcgcggtcgattctggtggcgatgatgtgggttaattcgcgccatgcccagcgggcctggattggggtgagggtctggccagggaaccattcatcagcgaccagaatgtcgaggttgcggtcggtttctttgtgggtgaaccggcctcgggcgggccgcccggacagcatgaacaggccccgcacgtgccagtcctggttgaactcgcgggtgtgagcgggggtgtcaggcagcagccaggattgaggctggtcggggatgttaccgcagacgatcaggcgtcgggcgttgtggtgtagcgcggttgttagcaggtctgacagggtcgcgtgcttggtgcgccgcccccctagcactggcaggatctcgtttccggccgcgtcgactccccgggcggtgtcgatgtctagccacactgtttcggggtcggggggccgatgtggggcgggacggcgctgctcctggtcgtctctcatggtttcctcctttgggccagggagcggccggcgtcgagggcgttcatgcgctcgcgttgttcttcgcgtagttggtagacccggcctcgtgacactcctgctgcctcggcgatggtggtggccggcaggtggccgatggcggcagcgtcggcaaggacgtcacgccaggccaggtcaatggttcccagctgggctagagcttcgtcgcggcggcgggtggcatcagccactacggaggcccaccctgtggggtggatggtcttgacgacgattcggttgtggcggatggggccccatgcatcagcggggacttgccagccgtgattggcggcggactcggtgatcttgaggcgtcgctcaggtgcgcgggtgcgggcagtgacgtcggtgttccaggtctggactggtacccacgtcccctctcggatgcgttcgatgacgcacgtggtgacctcgtcggtgactgtgatgaccagacgataatctttcccgtctggggtggttcggtagctgggcatgtcaccctcccctatctgtcaaatgagctagacacagtgtctatttaatttgacgcaaagtcaagtgcgctagacgcctttgtgtggatccgcccgcccagacaggcactcacgtctcatgacccgccgcgacgtcttaacgaaaccaaaccgcttatagaaccgctccgcagcgctccccgagggctttagctccaaggtaagaccttgctggtcggcccattggcagacttgggtgaggatgtgtgatccgtagccctgatttcggggggcggcatgcacgcacatcagcatgtgaccatgacggcgggtcggcgggctgacataagccccaccacgccagtccggtgtgatctgccaacttcgccatgccgcagcgcgccagcggcgggcctcggtagccaccatgatcaccatgatgatggacagggttacgacgccgactatggtcagctcactccagccaggccagttcccgcagatgatccagcctcccagcgcccagatgatcatggcttccacgcccgccgcaatcgggacgagtggggcagtacggatgcggcctgccatgatctcggtgatctcgctgcgatgccatgacaaggagaattcccacgactcttgaatcatgctgatgtgtgaacggcttcctcggcttcgctttgccatagcttctctagacggcgctcggctagctcgtcggggcacggcgacagcctgccgcactcggagcagaccccgaagtggcgcgagagagtgatgaccggctcatcgggagcatgaaccgactcaacgaccgggtgctgctcatcggtgagtcccgaagcgtgaccaatctcggctagacggaggtgaaccataccgtcgtagtagtcgaggccttcaacgtggaacgggtaggagccgtccgcggtgtggcctgcaaccaggtccccgacttccagctgactggcggtcatggttcgcaccggcggcagcggggtccgggtcgcgttgatcctcatggtctctccttgcttctgcgccttcatagatgaaggtgccacagccggggttgatgtgcggaaccacagccactttttcagcagatccatcaccacggtctcaccccttcccaaatgtgtaaaccatgatttacacatttggggcatgatcgaacccacaaccatctccaccacgccccgcgtggccatcatctcccccagcgggccaccacggttcttggccgagcctcccagcatcgcactgcgccgacacggccggtcccccatgaggtcccttcc

SEQ ID NO: 197 - DNA, 1732 bp, Propionibacterium acnes
tcgctgactacctgcccgcctgatcccaccccaatccactcgggcgcctgtcagtgccccctcttctgggtggtggtccggggcgtcaccgccccggaccagttgggtagtcatctcagttgaaataagcgattagtgatacgcccctcctgctttccggtgctgtcatgagcgtctgacaacagcgacacctcggggcagccgacggacagtcctctggctgccgctctgatcccatgcccacggcacgaaggtgtcggacagctcggtctcgtcatgtgcccaaatagcgtcgtgggcctgtcgccaagcttctcgggagccccacacgggcacgaccgggccacaccggtgtcctggtctccagtgtcgcgacactgtcgatttcggtacgtgcaatgcggcggcggtttgacggatcgacatcccagactcccgcgcgtcccagatcgccatgtggagagtatttgcctccagtgcggccgccacacttgcacgctctcgcgcacgctcgaatgcccgcctagtgctctcaaatgtcgtcacgacgcctccccctgaaaatactcagggtgtcccacggtgggacaccctgagtatttcataccccaactcgcctcaccacacgtcgacctcgacaccgatcaagcgacccgtatcagcgacattgccgtaccgctgacccgcctggtcctctagccacgacaacgcatcccgaaacagcccgacgtcttccaaagctaaaccacagtcgtagccgcccttgtcccccaaccgcacaatctggcgctcccggtggcctccctcgtcgacctcgatccacagtttcgcgtgcatccgctggcctcggccctctgacaggatctcggtgagcaggtcggacgcctgccctcgcgcatcctcgttactgcgggggaattggagtatgtgggaggaacgacgatgggggaggttggtgacctcgtgacgcagcaggttgcgcttgtgcatctgctgatcgagacgctcgggctgacctgttgacggggttgagccgtggcgccgcttcctcggcggggtctcgatccgttgctcttccggcggttcggcgtcaggttgtggtgcgcgatctcccctaggacgggggggctcgccacctatatccgagggacgatgagacggccttccacgcttgctgcgcactttcgcagcccgccccttgcggtcacatcgacgcggcggcggggtaacctcctcgccccgctccaactgtgttaacgcctcgaccaggttggtgccaggcttaagcccttttagcacgaaccgcaccaggcgggggtctcggccgattcgtcgggcaatctcggcttggctccacccttcggctaacagggtgcgcaccaggtcctgagcccgattgtcacgctcagtcactggtcgcctcctcggggagtcctacttgctcggcctgctctgatagagcagcccgttccgatccggtctggggcgctttcaggggaccgggtaggacacctttgacacgcagtcgcccgtccttgccgtcgtcgccgcccccctgggccacagggagcgcccaggggggcacgttgctggtgtagatggcgtcgccgtggatagccagcagggtgcgggagttcatgcgtagtgctcctcccttggttgtggcgttttttccggtggtggggtcggcgatgggtgtgttgagggtgcgtacgcgggacagggcccagat

SEQ ID NO: 198 - DNA, 718 bp, Propionibacterium acnes
ccggggccctgctgccggtgtgggacaccgccgttttgactgggcctgccctcggcagacgtgtgcgccctctcagcagtgacgccgaactgacctctcggcggtggctcgaccaggtcgccgaccatcccggcttcctcgacacccttatcgaggccgcccgcatcaccgagggatggcatcacgcaacacctccgcacattcaggccccttaccggacccttcatcagtgaacggaggtacaacgacatgaccagcgacattgacattgaccggacccacaaacccgacgaccgcgccgaggctcctctttaccggtcctgggccaggagactcgtgcacgtctccgggatgccctggcgtatcgtcgccgccttggccggggtctcccccacctccatgcaccggcttctattcggccgcaacggtcgacccgtggaatggatcggcatcaatgatgctcgcgccctgatggatatcggcatcgatgatctcgcctcagcgtccaccgaccgtatcccggcccgcgaatcccgcgagctgttggtagccctgcacaccctcggctggaccaacgcgcacttgagccgctggctgaccagctccgacctcgacctgaccaccacccccaaagccctctacgtcacccggctatccgccgcccgcatccaggccacctacgacatgctcatcagccaacccgtccgccgctgcggcc

SEQ ID NO: 199 - DNA, 12176 bp, Propionibacterium acnes
aaccgtcatctggcgtggagtagcgagctgatgcaggaaggcaatttgtacggccttcccgaggaagacccgttgtggggcgaggccgtggagctggtagcgggacttatcccctctgtgcgggcgatgtggtcgcacgatgggcagaccgtgactgtgtcggctggccggcgggtggcgacactggggatgccgatgcggggatggcgtggtatcgagatgcgcggctggaatccagtgggcgccgatacgtggtggatcgttgaccaggtgggtagttggctggtcgatcaggatgagccgatggtcgttgacgggagggtgctccatgaggcgtgggaacggtcgcagatggtccgttcaggccgctgagaaaaaatttaggtccgccctgcatatctccgccctgcatatcggggcctcttcataccttcaaaagtgtgaagggaatacagactcttcgactggaattaaaatggtatatggcgtgtccggtccgcacccagctccacgatgcgccataggggagccataacttcaccaatcgtatacgatatgagtgtaggtgagcatctaccggtggccgacagtcagatacaagcatgggcggatgaagcagaagctgattatgacctcagcatgcttccgccgtctcgacgtggtcgcccaccggtggggaggggcccgggcactgtggtccctgtgcgcttcgacgcggacactctcaaggcgttgtcacaacgagcccctgacgaaggattgaccacgcgttctgacgcgatccgtgctgcggttaaccagtggctcggcctcggctcgtaaacattatcggcgcgacaaccttactgatgacgctgttggttacgccgtagagcacatcttgtactcgtgggcgctcgacgatgctgatgatcctcgttgctggatgatgattcggtgttgacccagctggcctcctcatggagctagttatcctcatctacgacgatggctatgaactcctgatccacgccatgaaagcccgccctcagtatctgagctacttcgctatctagtgttgttgggcgagttgaactcaacttttctccgacgcaagcgccaataaaaggctgatccatccgaataccaccaaacacggctgacgtgtggaacagattcagcaagacagggtgcggtgctcgggtgcgttggggagatgaggatattcaggcttctggcgggatgtggcttgatgacgtccaggatcaccggttcggttttgaaggtgccttgcattaatgtcgacagggtcgtacgactcgaggattggatcgaccagcccgttgcgtctgaagaacttcatccaccccggtggagctccggccgcgtactggtgcaacggatcattagcatgggtagcgtgagtatgccttcgatcgtggtcagtgctgtcatcatccaagattctgacgggcggcttctcactgtccgtaaacgaggcaccgaggcattcatgctgccaggcggcaagccggagcccggcgaggactcgcgtcaggcagtagtccgggaagtgcacgaagagctcggcgtcgcattgtcttccgacgacctgcgtcgggtgggagtgttcaccacgcgagcagcgaatgaggccggccatcaggtggtggcgacgattttcacccacaccccggttgcggtgagtgagccagctgctgagatcgagcagattcgttggctcgattggagtgtcgacgccctgcctgacgacctggccccgctgctggtcgaggcagtcatcccgtggctgcggcgccgtatccggtcggtcgctgtattcacgggtgcgaaggatggaaccgaccctcattatcgtgtcgaagcaaccgccttgggccggggtctcgcacacgccgggatcaccctggtttatggcggcgggaaggtcgggatgatgggtgctgttgctgatgcggccctcgctgctggcggcgctgtgatcggagtgatgccgcagcacttggtggacggggagatcgcccatcctagtctgactcacctcgaggtagtgcggactatgcatgagcgcaagcagcggatgagtgacctagctgacgcgttcgtcgcgctacccggcggcggcggaacccttgacgagctattcgaagcatggacatggcagcagctcggtgtacacagcaaacccgtggccttgtacgactcgaccttctgggcaccgctgaccgcgctactcaaccacatgaccatcgaaggcttcatccgccctgaggaccgcgcctcgctcgtgatcgccgataccatacatcagctgatggccgatcttgagggatggaccccaccaccaccgaagtggcgctcgtgacatagaacaaatgattctgactatggctcattgacatctgcgcagcggctactagctccattgacttcaaatcgggccttggccgaggctcggttcaggtggcccggaatggatccccacaaattgaatgctcatgatcgaggtgatgaacgcccactctattgtcctacgcccggttgtatccagcgagcaattgaaggtgctgcgcctgttggtcgaccaggccgagccactcatcatcgacgggcgcatcttgtacgaggcatgggacaggctgcaaacagcccgtccggcccgctagaaaaaatttttagggcccgctccgcacatcccggtctgtacccacaccttcaagggtgtgaagggaataaaaacacacctaacaacaactttgtttcatgatttggcgcgtcggaccctttctgaccgatgtcgtgcgcaacaatggacccatgagttcgcctaccaagatgcgccggaaggggacacgcggcccgaaacctcgcagcgacgaggagctaacggctgtgatgttccgcgtcccagagtcagtggccgaacgtgtcagcgatatggcttgggagctgaggctctcccgatccgatcttgtgggctggtcggccctctatgcactcaactcgatgctcagacagcgcggagaggacacgattccggttccggagtatctggacaaggccgtgctcgctgcgttgtatcccgatgggttgcccttcgacgaggacaacgaggagccgggcgagaatgccgggcaggaggagcttgcgatgactggatgagcccgaacatggttgaaggccgccccgccaggcgaccttcaatcaatggtttcggttgtcagctgcagccacccttgccaggtgctgtggttcttctccagaggaggagggaccgccatgaagaccaagaagacctagaagatccaaaagaaccggtttcggctgttgcttcggtcttcatggtagctgatagcccgcgtcgttggaagtgcgacgacgccgatcctcatcggtatcgcaccctgttccagggtcgagaatgtgaaggattaacaaccatgacaagtcatgaggcgtcctcccggagggcgtcatgaccgctttaattcaagctctgccgacagctgaactgtctgctggacctggtgctagcagtccagctagaccctctgctgagggcttcatcaagattcatcacgaccttattagtgcgggcgtgtcgggtaacgcgatggcgttgttcgtcgcgttacgtaaccagcccggctgtgatcagtggacccgtcactcgtacctgcggctagcccaatggtgcggctgggatgggctgtcgggggcggcgggctgtaagcgggtgcagcgggccgctgctgagctcgctagcggtggttggctggaatcgcgggtcggccatgatcgtcgcaccgctaagacgctggtgtggcatcggttgaccagccccgacaccgaccgctgggagcaattgccgcggattgtgtgggcgaggatctgccagatcgccggggagacgtcgggagagtgggtgaggcattggctggtgtggcggatgctggccggtcgtactggtgtggctcaggcccctatgtccatcgtggctcggttcctgggctgttcttcgcgccaggtctctcatatccgtggggctctcgttgatgccggtctgctcggctgtgacgaggtgtcgggggcggcgagccgggtgtggttcccctcgatggccgaggagtgtgcagcggatcgtgaggtggttgatggggccgtcgtcggtgctggggtgggctctggtgaaggtgtcgaggagggcggggaacccctgtcgattttgtccacccacccctgtcgattttgtccacccacccctgtcgattttgtccgccaagtattagacaaaccattagacagtgaattagaccttgggtcgcgtcagcgtgttagctcaccaacgcgcgcgcgcgcggcggccgagccgccgaagccaaagaaacccataccaccaacgcctgaaccagcagcccccgcttcagacagtcctgtgtcagcgcacgctgatgaggctgccgagttggcgtggcggttcgtggggtggtgtcctcagctggtaggggcaccgaagaaggtgcgtggccagctccgtcagctggtcgctgccgagatccgccggaatccgggctggctggatgcgccagcgttggaggttgttgcccagcgggtacgtgctgaaggtgcgctgggggtccagcactgcgagattgtgcgagccgagctgcacggggtgatcgccgaccagaaggccgcccccgcccgccccgacgccctgcacgcgcgggagcccaagtggtgggacgacgtgtactacgaaggaaacacaaccgtgtggtacgactctgacgaaaccagtgacgacgacgaggcgtggaaccggtcgcaggtatgtcatgttgctgagcgtgacgacatggctggcgggattgctaccaacctgctggcctcccacgctgatgatccgatggcctggctgactcgccgtcaaaccatgctgatggctcgtttcccccacgcccagaacgaggtcatcgcgatgtgccacatcgtgcgcaccgccctggaggccgacatggccgccggaacccggtgggaggactgatgagggtctcccggcgcgccctcatggccgtggcccgtgccgacgctgccgcagcagaccatgccaccggccgatgggtggccacagccaacgccaccgtcgcccggctgaccggactgtgcgaacgcaccgtccaatacgcccgcgccaccctggtccacctgggcctgtgccgcgtcgtggccaccggccgctacctcaccgccgacgagcggcgcatggctgctcgcacccatggcggccgccagatgcgcgccgcctccacccgcgtcctcaccatgtcctgcgcaatcgtttgcgccctaccccgaaggggtcaccactacaggaaagttaagttcctagatggtcaccaacgcacgcgcaggcgcgtgcgaaggccagcaacaccagagaagaaacccctgtggctgcaaaaactcgcagccctcctcgaccagcacctgccctggctggtgagaaaccatcacatcggccgactgtgccacgccctcaccgccctgggcatcgacgaacactggcaacccgcagacctcgacgccctcctcgacgccatgaaccgcaggaaccgtcgcctcggcctcgacgtgccatgcgccgacgaccagcacaaccccttgggactgttcatccaccaggcccgagacaccctcacccacgacaacccccatgaacgccgcctggcccgcgaacaccaccgcgcccaactcatcgacgaccaactccgccgccgcgcagaaaccgccacctgcgcagcccgcctcgcagccgagcacgccgaccccgactaccagacccgccgtcgtgaacgcagggaaaccctgcgagccacactcagggccgcccagcagcatgtcaggacacactgatacccgctcatacacacaccgtgaaacacgacaagccacctgacagtatcagctgcaagacgcatgacaacatagaagggcatgatgaaatacacatagacacaaccccgcacagcagtttcgcaacaaatcatgatagtctcatggcagtatcgcttgatacacacatagcatcactcccacataggcagttatgctgatatactcctactaggttatccgtccaacatgctgagtgggttcctgtacagcatgaaaggagcatggcatgatatgggccgttctcaactgcaagggtggtgtcggcaagacgaccagtgccctcctgcttggcggcagccgccgccaagcagggccacaccaccctggtggccgacgctgacccccagggcaccgcatcccagtggtcagccctggcaaccaaaaacgacgaacccctgcccttcccggtgcaagcggtcaacatcgccaccatggaggcactgcccaccaccaccgacgcccatgatctcatcctcgttgacacacccccctcggcaggcgatctgatgttccaggcatgccgcatcgccgacctcatcatcatccccaccgccacctccggacccgacatctcccgaacatgggtcaccatggacgccacacaaggcacaccacgcgcgatcctcctcacccaaaccgaacacaaccgtgtcgtctaccgccaagctcgcactgccctcgccgccgacgacaccgtcgttctcctggaccacgacatcccccgccgtgaatccatccgcacagcatggggcaccaaccccccagacgacgtcatcacctactacctgcccgtcctcaacgaactcatggaggccctgtcatgaccaccaagaaaaccgacccattcgcccgccagaaagcagcagaagaccgcgcccaccaactccaagacgaagcccaacgccacgcccaccccaaacgcgtcatcggccccaccgcacgattccagttcgtcctgccagccgacgtgctcaccggcctcaaacacctcgccctcacccgcggcaccaccgcccgccaactcaccctcgacgccctcgacaccgcctacggcctcgacaccctcgccaacagcgggaagaaaacccacccatgacccgtgggtccccctgccaccaccccctcgacggcaactgtgtgcgagccacaggcccgcacacaggcggcagcccagtgccgtccccgccaggaaaggaactgaacttttctggagtgctggctccctatcaccccttatggtgctatcagatccagtagcgccagcccgagaggaaacccatgagctacatcgtccgcaccggaaatctagccggcacccccgagctgcgcgaggggtagccgacacggcggaccgtgcccctgacagtaagcggcactactggagacatcaccatgaccgctcagatcctcgccccgtgcaaccagaaggctgccgtcatcgaaggagccctgccatgaaccaacctaccccccacaaggccgacgagttacagacgagcaacaccacgaggaagtggcggcacaaggtgtcgttctaccaagacccggccgacaccgaccgagtccgcggagcgatcctccacaccatgacaaccgaaggcaaccggaacctgagccagttcgtcaacgatgccgtcatggccaaggtgaccgaactggaagcaaaatacaaccacggcgagccattccccgccgtgggagcccgaggactcccccagggcggcgcagccgccaacagataagagggcggggaccaccaatagcagtcgatttcggatccagatcgggtagacaggacccatgatgaatttcatatcctccctgctctcggccatcctgaccctctttgcgatggtagccgtggcgataggagtggtgaacattgtgccgggaatatgcgccatcatcggtgcacggaaatacggcgaccaggaccgtgtgcgggcaggacaacgaaagatccttcttggtgctatcgccttggtggtagcagtaggcattcacccgtgacccacggttaccggaagccccgccgcaatcgataccactgtcagtaccatcaggggcgataggggtcaagctctccttgtcacaatcccttccccggcagcccagtaaccgtcgcttacagccatacatggatatgcgcccattcgtcggcaccgacgccgtgcgggttggcgacgctgacccgtctgctcacaaacgacccttccagcccagcaccacccactacaccgacacgatccacgaagctgaaaccgaacctcccatccccgtccgaaacatcaacgaactcatcaaccccaccaaccatgcatgaacgcacgatcgcctaccggccagccttcctgcgcgacgtgaagcggctcaaaaacaagcactacaacatgaacacacactcaaatgggcggtaaggtcacgaagtcgacgtggctgcctcacggatggcttcggcgagctcttggggtcgactccacatgggccagtggccggttggcagatccatcgcggtgaagttggtcaggtgcgcgacggcgctgaacatcggattgcctgctgcggccagctcgaggacctggacgctgggaatggagcagcagatcaacgtggttagtacatcatggcgagcgctattggacagcgcgacccgtgcccgggccacttgcgcgggttcaggaaccgcccgtgcccggaaccggtcaaggtgctcgttgctgaggccctctaaactggcctgcttgccgagagtatcgaagtcaggaagtggcagctcagctgtttcctcaggtagatctggtgcgaaggcacctccatcgctcatgggaccggagtccacccagacgatccgatggaccaactctgggtgcctgtctacaactaggctcaccggcccgttcgcgccactgtgtcccaccaggaccgcatcgccgcccatctcgtccaggatggctgagatggcgtcagcttggtcgtcgagcgtgcgcgtagtgcgctgggtgtcctccggatcgaggccaggcagcgtcagccccacggctcgactgccagcagtgttcaataactcgactacctcgtcccaagcccaggctccgagccagtaaccaggaacgaggacgataggccgatgctggtcaggtcgcgatgttgaagtcatggagacatagttgcacagtgcgcggacaagggagtggcactatttctggcatgaatttagatctgggtgtccggtgaggcgatcagaacgcctccatgtactgtccgagtgtctacgatgcagcggacacagtcgagcagctggctcacaagtttccaggtgtccttctgcccctatgagggaagtcggctgctctcgcaacctttgagggctgctctggggtcggaaccagttacagatcgttcaagttccgggaactaccgccggtcacgctgattgattcccgggcgatctcgcttctgacgacagtggtcggtaaccgagaggcgtcctactctgaccccgctgctgcggtgagtaaatcacgggcgtcccggatccggccacccgtccaagtgccagccagcttgatcggctaggcatcgtcaaggagcgacgatgaggtgatgatgcgatgtgagcgcaccgcgaagtgaggtataaagaagccttcccgggcgcatgcgtcgcccaggaaggccaggttggcccctggacggctgaatggttgggcggatcaggctgtagcggagacgtgcagtacctcgtaggcgatggcgttggttgggctctggtctgcatcgtggctactgagttcgacgaggatgacggtccaggtggtgatgtcgacggcggtgacgcgggcgatggtggaatcagtggatgctgcaaggaagtcggcggttatgtcttcgatgcagtgggacggagcagtgctggtgggcaggggcacggtcttgacggtcaggcttcgggcagcagagtaatcggcggttccgttaacaagctggtggacggtccagtcctggatcgggtgccggccgaagtcgcgtacgatagccgagtaaccaagttcgccccagcagaactggcgcatcccctctatgtcgcgccagacgtagaagggcgcgtaggagttctggggtgcgcctttgaccttttcttggatgaggtaggccttgaactccagtccatggtagccgtccatgaggtgtccagtctggatgacgcggtcgcggatgatctgcatgtcatagtcggtgggcagggtgatctgatattgcatggcgtacatcagcggttctccttggtttcgtgggagtaggtcgtgggggtgacgggttcctgccaatcgatggttgacaagtcgttggcggcttgttggtaggtaaggtggatcattggctgtttgagtgcagcgccatgccagtgtctctggccggcgtcgatccagatggattcgcccttggtcaggtgctggggtgcttgtccttcaatatggaccagggcaacgccgcccgtgacgtagaggccctgtcccttggggtgtgtgcctcagcggcaaacgtgacggcgtgggcggcacgcccggcgtcttccgtggcacgatcggccggatccatggcggcgcgcagctgctgttctgcagccaggcgtccaggtcacggcgggcagcatcgacacccagggcagcctcgacggcttcagggctacgacgctggccgggctggttgaccgcagaccactggtgccgggcgtcgtccagatcatggccggcggcgtcgatgagggcggtggtggcttcggcgcagcatcgcctgatccactccgaacgtgacaggccagctgtctcggcggcactgtcatgcgcgccaggagagatttcatgggcgctcatctgtagcctccagataggcgttgatgtagcgcagagcctgatccgtcatgtcgatggcggctgcctcggcagacgacacaacgggctgtggatgataagaccacccaacatagacggcgaacatcaatttctcgacagctttcatgaggtccccggcggcaaccgcatccgcctcatcatccgaggagaaccacttcaggtctgaacggctgtacatagcccctaggtcctgatgtgggtcgaggtccttggaatgatggaagttcctacacacccatcgccaaagacctcaacatggacaacgctaccttcaccactccctcatccgtgaagagccagtttatgcacggtgttgaaagaggcgtcggtctacgacgaatgcgggttaatggtcttgcggtgtggggcgctgggcgatggcatcgagaacgcgtgagtgggtggcgatccattcggccgcgtcggggttgatgttgcgggcgacggtgtcgatcgctgttacgtagtgggcaagcctgcgaatctcagcttgttggtcagggtgagcgctgatgaggggctcttgatgggaggcgcggttacggacgtggcggatgagctccacgttttcctcgaagtcgcgtcggctacgccccgggtagtgaggcatacctccgttacgtaagtcagtgagagctttccatacggttgcttccaggcgcggggtgagcagaaagcgccagttgtccagtgacagactcgccacgatctgatcaggggtcgcatcgagcctcgcgcgccgcagtcgcttctcggccctgtcgacgttacgcgggaaaccaccgagccgatagctcggggattcccaccaacgccgtatgccagtatcggcgctcaggcgcacgtcaatgaagtttctcaggagtacctcgacatggctgatgtcttccaagaacgctttcgagatgcgggtgttccacacgtaccacgcatcgactggttcgatccggtagcggctgagcctggcgggtgagaaccactcctgcaacgtctcacgactcaccgtgggagcgtggtaagattgatgacgataggcctcgggaaggtcaatgccgcgaaatatcggtatacccccgaggtcattgtcttgcccaggcccctcctcgcatacttgcggggcgtcattggctgccgtcatctcgtctcttcccggtacgtggctgtccatgttcacgggcaggtacggcaatgaggttcccgcacacaaacctctaccaagcatacgctggcaagccgttgcatgagacgacgcctccgcccgccacaccaacggtcaccgccacggccacggtgaccgtgaccgtg

SEQ ID NO: 200 - DNA, 7612 bp, Propionibacterium acnes
ggttggactctgcacccatttcagccgggtacgttgccggctgggcgaaggaagcagacggcgccgcgattgaagctgccgccgagcacgtcgcgaagacctcccacgcgattgccgaggcgttgcagctcaccgcacagtgagccccacggggcgaccggctcaccccggtcgcccctcaccccccgacaggggaaccgttcccgccgcctgaatctccatacccctgatacgtactacgcggggtcgaggagtggactccccccgccctcgtgtagtacactgtactacagatgtcttaagaataatcccgaggtgacgtcatgagtttttcgatccgtttaaccgaccatgagcgccgcttagctgattcctacgcccgcctgcactcgcagtccctgagtgaggctttcaagcaagccctcttcgaccgcatcgccgacgagttcgatctgcaagtagcccgtgaggcactcaccgactacgcccgcgacaactaccagtctcgccccatcagcgagctatgggacgagtgtgacctatgagctggcagatcgaaaccacgagccggttcgataaagaattcaaaaagctagaccgctacacccaaaaactcattcacggctggatcacgaaaaacatcgacaacaccgacgatccccgccgccacggcaagcccctcaccggtgatctttccggactgtggcgctaccgcatcggcgactaccgcctcatatgcacactcaacgataaccgcctcaccatcctcgccctgtccatcggtcaccgccgcgacatctaccgataagccgttgcaagactgcggcgtcgacaccgccgggaccctggcccaggccttgggcctggaggaggacgagagcgaggagcacgccgcctgagcggtcgccggcacttcccataacagcaccggtcccggcggcccggccccgcgtctggtgctcggaccgatgccggcgcctggcctccgacgcccgccggggccagcggctgggctacctcgacgtcgacgtacaacgggccgaacgaaccgtgcgctgatttaccaccgcttttgcgctgatttaccaccgcttccgcacagagaacatgcctctgactaggagaaatgacgttttccacagggcctctattactaatatccctattatctctatccacgcgcgcgagcctcagcgttcaagcttcaggtcttgctcgtctccctcgcgcctcgctgcgctcgttgctactgccgccccacccggcaagccgggtgggttgccatcggaataccgtggaccatcccggcgcatacacccagacggtccaagatccaatccacgctcacccgcgacgccgctaacgatcctcatacaccgtagatgccgttctgagagccttccagacccgcacgtgggtttattgcaccgagacccaaatcccctcagaagcgatcctgaaaccgtctacgccccatttccgacggacgctggacaggctgggcggcttgtctcccgccgcagacatggccctggcatatgcggttgccgactggtgggatcagggattggatcacacggcagacggctggtccaaggcgggtgtgcaggtgcggtgagcggcagacgtgaccggtggggtgcactgtcatggccgggcatctgccgagccaccatgcgggccctggaccaggaggcagcccgctgcgaggactgggggaagacggcggcacggatgggccgtcgggatgcggcggccgaattcaccgagactgcggtgcagcatcgtggacagatgcaccacctcatgtcggcacaaaaagtgtgggtgtcgaccgacatggtgtcggctacactggacgccgcaggagacgtgccgagtttcgaggccgtcgacgtccctgccgccgggctcatgggtttggccagccccctgccgccggttaccctgcagcatccgctgtatctgcgcagcgacgagggtgtgacaaccttcactgatccggttctcgtcgacgcgctgggatggtggatggattctgggcgtgtgcacgtggtgatgtgcacacgcataccccggctgcccaacccggtttatgcggtggcctccccactgacggtggtggagaaaatcacggtgcccaccggcatcgagttcgagaccatggagtccaggatcctgacccccggcggcgtgacaggcgtctcacggcagggcacacgcatgatgatccggttggcgtcatggctgggtgccgcgtgggtgctcatggcgactccgacggtgtcggagccgcaccctatggatggccggtggggaggcccagcaacggggcagacccggccgcgtgatcgggtgaccgtggtcgacatgcggcccatgaggcaggtgcacaccaccaccgaccccactggcaggcggttgacgacccggcatgtcgtgcgaggacactggacacaccaaccctacggcccggcccgcagtctccgacgcctgcagtgggtcgccccattcatccgcggccccgaaggggctccgttcgtcggcaccgacaccgtcaccgtatggcgccgctagatacgcgggcgcggggggttgacgaacgatgcccccctctttgtgttgtgatcagtcgtgatcggcgggttttaggtcggggtaggtgtcgagaatggccttgaggacgaggtcttggattgtggtgtcattctgggctgccttgaccttcagtccaacgccgatgtcccgggggattctggtctgcaacttgaacaggtctgcctccttggttttgaacagtttggctgcagggttggcaacgggctgttcttggcgctggcgtccaaggttgcttttctttcgggcggtcatgacatcatctccaacagttcgtcggcaacatcggcgaagaaggcgatagtttccggctcaggggtacagccgtaggcgcgcttgatgacttgacgcttggggatgacgtgatcgaccaactgcgtctgggagtcgttggctagaaggtcgcgaccttccttgaacagggaggtattcggttcagctttggaaagcagcaccacgcgcggggttcctgcggcggcgtcgtgcgtctcccaggtgcgcgccatgtcgagcccggacgtgtcggtggggatgataaccagatcggcggcgcgaatggcggcggtgatgatgtcaccgttgcccggcggggtgtcaatgatgacaacttcttcgggtccggcgacgaggtgctggagcgtcgccttgttggccggttccacggggaaccccaaggggtcggcgttactcagtgtgcactcggcccaggatgatgctgacccttgagggtcggcatctttgacgcggaccatacggcccgtctcatggagagctgcagccagcaggatcgctgccgtggtcttaccgacgccacccttggcgttgataatgctccagatcatggtgacacctttcagtgaggatgcatatcagtttacctgcaaggagtaaagacggcaagcagttatgccgtttctgcggcaagccgtcttgcatccttggatgtatagatagttgtctacttatggttgtggatcgtggtgtctcgtaccaggatttagtgtgctcgctgatatgcacgactttcgggcggcctgatctggcggtggtgccactaacccaggagtctgatccgcaaggtgtcctcgactttgaggaaggggtctctgctttcgtgttgacctaaagtcaacggccctgggcgatcactgaatcctaataactttgtatccttccctgattgcatcttagcatccttgaattcaaacagggatggagccatgctgttttgacgacatggatgcactggggtttggttgttgccgatgcggagcgtcaggcggcccgggacgccgccaccgccgacacgctgcgggagatcgtgggactgctgggccggggcggcgaggtcccgcccgccaagacggggcgtaagacgaccggcaggccggccccggcccgcaagtcgtcggccacgcagtaaaggcagggatccgtccctacgcagagagcggaggcagatcctgggggatccgactcttcggttccgtgatcttcccggagatcttcccggatcccccagggctcatcctgatacggggtccgccgacggaccccgtatcagtgggggcgctgccaccagtgatggcgggcgggtcggtcggcgtctaggccccgcccgatggtcgcctggtctacctcgcaggcccgtgctgttgccgaggccgagaacgtctgcccacttgttgccgattcagtcccctctccgtctgccatgtcgccaacctttcctatctggcgtgctcatggacatgcccgggcacgccctcgctgctcagaggcctgctcgttccacctctggccgcgaaccgtatttctgctgaccactcctcgtgcgtgaatatttgccagccttggccattcatatttggactactctgcaccagatatcggactgggaaacctcttgcacatctctaattgtcatctattcgttgggcgcgcgctgttagatcgtgatcataccaatcagaagacaaagcgacgcccttttgagcggcttttcgaacgattctagaccgcgctatatcagcatttctaccgcgcggccagagtgctacactaaattcctctctgcaatccttaagtccattctttacttcctcatccaatttctgcgacagcatttttatggaagcatcgcactctgactcatcatcaaatgcctcaattgcgtgcgttcgccattcacggcgcgtattatcgtagccgtaatgaagtattacccaccgatccacagaatcatcgttaggatctacaactgtcatgaatggcccaactctcgctctggtgtattctcaattgcagttcagtgactttacttgaccagtcccggatttagtagacgtagacggagagtaccccgccgggaacttgactgacatcactgctgtaccgtactgctttcccgggtggcaaccatcgtaagcagcatttgccgtgacgtacctagtgctctttctctgagtgccggtaatcgccttatatggtacaggtgggtgaatcgtagccgttacggctaccgatgacacgtttgcatcacatgaagctgtggcgacataattagttgtcccattgacatgatgagagtcgtggacatactgtcgaggatcgagagtgcaggttattgttgacgccgttgttctggtaccagctgctttcgagctctttgttgcagttacagtctgcggccctgaaggttttactgacgcgactgatgtgttcgcgtgttttgcggcagtgctttgatttggttgtgcttgtgtagcagttgctgatgtcgccagtgatgcccccattaccatagctgtgattatggcgtagtctttacgcttcattgcgcccccaaataagcatgttagtttgctattttgaataggatacgagacatcgccatgacttgtcaagggcagaagtagaaagaatcggggggtatcaagaaagatgtgctttcatcaggacgaaagcggatgggtccgttcgacttggtgacgaatgatccggccttgcgtcgcggagaccaggccggcgagtttgtcgagcagggccgccgtggcctcatcgtcgggcacatcactaaagggacgaacaaccatgacggctagggccagaaacgaccggaactgaatcgcatgtggacccccatctggcaccaggcacacacctaccgaccggaaaccctgcaccctgtcgctcccagttcacctcctaatatgcgcctatagtctgtgctagtagacattattttgtgtgttgtttcccatctggcatgtctggccccggacccgccgcgacacgcggtggtggataacagaccaggacccccggaccatagagaccagggggacgagacagtcccccggtgaggatgtctcgatgtgcagatcaggaacagaatcgccgggcacgacccggcgccggtgccggtgcagtgaacccgtggcccatcgactccacgaacgaacgtctcgccttcctcaactggtgttggcggcaaggctactcagcagccatcgtggaaacgatggacgccgcgggagcctacgaccacctcgacgacgaccagaccagcaaccagcacgactaacgccgctcccagcacgggggaaggcggcgcaccaggtgcgccgccttcccccgtgctggtgtctcgtcggcttactggtgggggtcgtaggggaacccgtaggtgtgttccagggccttgcggagaaggtcgttcatagttgtgtgttcggcgacggccttcatcttcagcgccgtgtgggtggcggtgggtagcttgacgttgaacgcggtgatcggggtcttggccgactggaaggtttcagagacactggctccctggctggccgccatttggtcggcgtaacggctggctttgtcggcggcggtgggtttgcggttcttactcacttcagcatctccttgattcggtcggcaacctgggcgaactctcctagatctgttggccgggttccgatggcttgccgataggcgacccgtcgatgaacctccgcatcgagaacgtctaggccctcaacggcggcggccccctcgtgggcatcacggtattgcctggtccaatcggctttgttgaagagcagggcccggcgtgtgccgtgggccacctggtaggtcattagcgctcggtccatgtccaggtcccccgactcggtcgggatgatgaccacatcggcgatgtcgagggctgcggtgatcgtctgagagtcaccggggggagtgtcgatgatgacaaggtcggcgtcgatgtcacggcagcgcctgacgataggggcattagccgggcggacctcgaagcccagcgggtcaccagtctcgaaagcgtcggtagcccatgacgtcgccgatccttgcgggtcggcgtcaagcaagatgactcggtactgagctgctaaggccgttgccaggtagaccgccgtggtcgttttcccgaccccgcccttggtgttgacaatagaaatactacgcataaatacatcattacacatgcgcatcgatgtatctgtatatatgtgtatcggcgtgttgcgaggggaaaccccagcccacatacaacgatcccccagccaccacagccgggggatctctcagtaaagccagcaactcccacagaagttgcacccccacgatacccaccacatccgtgtcaagcccccacaacacccaccagcgccctaggcttcccccatgaacattgacatggacgcaccaaccgaaaccgaagccgacaccttcgatgccgtcctcgccgacattaaccacatcaaccgcctcaccgccgacgaaatcgaggactactccatgggagcctgcctcctcctcaaccaccaccccttctccgaactccgccaacactgggccgacaaccccaccgacgaaaccacgtggaccctctacgggaccatcatcgccgcctccaccctggacccccacctcagcatcgacgccctcgcccgcttctaccaactccccc

SEQ ID NO: 201 - DNA, 4261 bp, Propionibacterium acnes
gacgccggccaccccaactactccgacccacacggtgaccccagctccggcctctgccggccactcgaccagcgacgagcacccactccatacggataccgccacagcggacaaggccagcaacgaggacgccctgtccccaatccaggtgggcttgaccgccagcgtcggactggtgctggtcgccggactgatcaccaccctcaaccgccgctaccggacccggttcacccgccagccccgcggcaaggccatgaccctgcccagcccggacgcccaaactgccgagatagcgctgcgcagcaccggggcgactgacactctgacgatcacctgcctcgaccaggcgctccgcgcgatcggcgcatggtgccaccactgcgggcacccgctgccacccctgctggccgcccgcgtcgatgacgaccggatcgacctgctgctatcccaggcggcccccgaccatcccgaggcggtggagctggccgccgacggatcggtgtggaccctcaccgccgaccggatcgacgacctgctagcccacaccgatgacaaccaagcggctccgtggccgtctctggtcacactgggacgcgacgacgacggcgcccacatcctcatcgacttggaagccgcaggaaccttgcacctgatcgccgatgacgaccaggtcgacgcggccctcgccgcgatcgccgtggaactggccacctgcgactggtccgacgaagtcaacgtcaccctcgtcggccaggtgtgcccgggcctagaagacgcactagagtctccgaccctgacccgcgccaccgacgtggacaccctcctcaccaccctagaagctcgcgccgacgaccagcgacacatcctcaccgaaggaaaccccctcgccgctcaccgagccgaccccgccatctccgacgggttcgacgccgaagtgatcctcctcgacaccgaactcaccgaagaccaccgcaaccgcctcgccagcctcgtcgaggctcttccccgcgtgtcagtcgccgcggtaacaaccagccccaccagcccagacgaatggtccctcaccctgacaggtgacccactagccgccgacctggctcccctcggctggcacatccacccccaaaccctctcccccgacctgtacaaccgcatggttgaactactcgccaactccgccgccgcagactacgaacccgccagctggtggaaccacgacgccgacgacgagcccaccaccgaccccaccaacgaggaagaatctaccccgagcaggcgagcccgcccgaatatccgcctgaccaccctgaccggcggcatcgacctatccagcgtcgacatcgacgacatcatcgacgaagccaaccaggccctcgacaacaccgaccagaccaccaaccagaccaccaaccaggttcgcgtcgacaccgaccaacccggcaccgacacccccttccccatcgacgacatcgacccgctgagctccgaccacccggtcctatccatcatcggccaccccgacatcacaggtgccactggaaccgttgggcgctccccgtggcgctgccaacagttggccctctacatcgctgagcatccgggagcatcgggggcgactatcgccgatgatttggggctatcagcgtcgacggtgcgctcgattgctacacacctgcgacactggttgggagccgacgatgccggggtggcttacatgccggcggcgacgcgcggctaccgtctcgatgagcggatcgtcacagatgtggacctgatcgacgctgctgtggccggggcaggcattaacaccgctgagacggccacactggtggccattttgaagctgggccgcggacgggtcttcgctggggttcctgactcggaacttcgccagttcagggcgtcgatgtaccacgtggaggcccgcatcgtcgatgctgccctccaagtgacagaccgggccctggaagccggggacctggggctggcccggtgggcgttgacccaagggctactggtgtctcccgatcatgaggacctggtcaccggttgtctgcgcaccgagtaccaggccggcaacatggacaaggtttccgagctggtcgatcacctgtcggctaccgcacgacgcctgggcgtcgatttgagcgccgacaccacccggatcatcgactccgttattacccatacacgcaggagagcatcatgatctcccgttgcactcatctccgtcaggaaggttcctatgcaccattatcgtcttggtatcggcactgccctcatcgcggtagcagccgtggccggctgtcgctcaacagactcgacacccacaccacctccatcccgtgtctccgccacgacatcagcgagctctaccctcagcccgaccccgtcagccggagcgatcagtgccgccgacgccgaaaacatctaccgcaccgtccaagctaacaagatcgcactgtacaaaaagggtggcctggcacccggggaacccgcacccgcgacactgtcgaactacgccaccggccaggctctcaccgactacatgacctacatgcaccaaatctcggggcagggcatcaaaatcacatcggggaactcctcggttaccgcggtgcgggagaaaaagggtgataccacctaccccgaagccgctatcgccttggaatcgtgcgaagacgacagttcgattcgtaccgtggaccgccacggaaaggctgatcatggacgcattttccatgtcgacagttggtatgcccgcgataagaagggcaccgtcaagatgatcgcattcaactcaacggaggtccccacatgcgacgtcaagtaatcaccgcggccgtactgggcctggccctggccaccacctccctgcccgccctcgcaggcggcggcgacttgaacggcagtgtggacacggatggccctggttacgatgtgcgtactgaggtggattaccatcacaccaccggtggtgcgggtgggggtgccacgacagggggccatcatgggggcaaaacccacggtgatggtgaaggtgaggctattgatgggcgttctcgcgccgatgccgaagccgaactagacgaagccgaccgtaaccaggacttgacttgtgatgtcttgctcccaccggcgccgaataccccagccggccaggaatgggcgaaagaatgcaatcccccagcgaaaaaggggcagaaggccaccccgaagcccgatccggtgttagtgggccgtcacgcggccttgcagctcacccttcccggcgcggcccctcgtatcgatccgtcccccgaccttaaccggtggcactcggcagcagtgggccaggctttgtggttgtcggttgatgaccccaccgccactacgcagaaatcgatcacgtttatgggccaggttgtctcgttgagcgccaaacgtaacggtttgtcgtttgatatgggtgatggtcatgtcgtgcactgtgatgccacgacgacatggacggagtcggtggaaccggggaccccctcacccacgtgcggttacacctaccaacaggcagccccggccgggggctataaggtcaccgcaatcacgtcgtgggatgtgacctggtcggtactaggacacacgggcacagtccacatccagaaggccggtgggcagatgcttccggtcggcgagttggagtctgttgttacacggcgatgactcctgatagtccgacgctgtatgaggtgttggaggtctgccctgatgccactgatgaccagatcaagacggcgtggcgtcgtgccgcgaaagtgactcaccctgatgccggtggcactagtgaggcgttcgcggccgcccggcacgcctgggaggtgttgtctgatcctgcccggcgcaccgcctacgatgccgacctggcgggggaggatgatcccgacgacgaagccgccgacgccttcgacgttgatccgttcacggcatggccctggtgcgccccgtacatcgacgccacccccaccctgcgccacacctgccccggcacgatcaaggccatcgtggtcgccatcgccgggatcatggccggaatcggctggcaggaagcgctggaggccgtggtgtcgccgccggggtttctgggggcgtgctggatagtctcagtgccggttgtcgtcgcagtgacatggctggcagcggtgacgggtctggcatttttcaccatggcggccatctggtgtggatggtcgttgataggtggtgcgttgctgtggggccagacgtc

SEQ ID NO: 202 - DNA, 12448 bp, Propionibacterium acnes
cccatcgtttacatcctcgactggtccctgcgaccagtgaaccgtgcccccactgcgcccacaatgatcagcacacccacggcgatcatcaggtgggcagcactaactgatcccaacggaccaagatcaaacaagccctgcccgggagcgtcgagcagtccgtgggcgcgaagccatgctccgagatgaccgatgattttaggggccatcttcttcagcagggctatccctccgataccaacaacgatgaaggcgaggatttcttcgcatccgttgtttccttctccggtggggccgttcatgctgccttctcggggtggacggccagccagccgatgaggttgtcggcgatctgccctgagatttggatcagttcgacttgcccggcctgccatgcccgcgatgcgccggccagcaatgatgctgggacccctactgcgcggccacgggatgcaacctcagccaaggcggcgcgtaactcctcgacggtgctttcgatgtaccaactgccgtcagtactagtctcagcggcatcggtggtagcgataagagcatcggtgaggtcgtcgacggcgcggtccagatcagcgatgtccggtagggctacagcagtcatggtgtgtcttccttctagggtgccttcactggtgaagggtccctagccccggccgatgtgcggtgctgtgggaaaaatgcttcccattggtccgtcttagttaggaaacttggcctaagtgctgtcgagggtcgcgtgttcgtgaccggttcgaagacactgccgctttgccttcttgtcagtggcgtttccgagatggggtcagtgggcgatggctaggccgatgagggcgccgctgcacaggctgggtgcccaggggaggaatcgggtggtgtggtgtcggaaccggtcgattagggcatatagggcgatcagggtgaggccggctatgaccgtggcgtggatcgtgtcgatgccggttgctgcgaccggggctgcccacagtggtgtgatgcgcacgtcggagaagccgaagccgcctcgggagatgagccaggcgatcatccacgctgcgaagatgatggtggtagcgatgacagcacgtgttgccgcagtctggtccgagagggcggtaacggctacagccccgatccatccggcccatccggtccacgctagggctgccggtatccatgtggtgatggcgtcaatgacggcaacccatgccccgatggtggctagcagggcccacgtcggccacgtgggtgctggggcccacattgtggcggcgatcatggtgaccgcagccgcggcacagaccgcgatcaagcttcggagactgtaggtgtcgcggtaggcgattttgtcgggggtggcggtggccggttcgggcaggatgcgagtgagggagggccatcctgcggtcgcaatggtcacgacggcggcgatccacacgatctggtgcatgggtctcatcatggcccaatatcgatgggtgtgggtggccgacatgggctcagtcgtcgagaggtttgcgggcggttgtggcttcttgggtgccgaggatgagggtgccggagtcgtcgccggctgattcccagtcgacgatgacctggtcgccgtcaacgctggattcggcgatggtcacccattgcccgtccatgtcgatgagcatcccggcggccaggtctgtgacggcaaccgggtggggtgggctgtagaggaggtcgatgtcgcgggcagggtcgtcgggttcttcggttacctcgggtggggtcgatctggctgtctcggtgtcgtcggccaggtccgctcccaggatgcgttcccattcggggctggttttcttgcccgctgaggccatcgtctcgtcgatctgttcgtcagtgggccacacaaatttctttttggtccaggtcgtggtgtcgggtcgcagctgatccagcagttccaggtcttgcggggagtgggccttgcgggggtcgggggtgtagaagaattggacttccttgggggctgattcgccggataggtaggtgcctcggccgcgtttgccgaacgggatgcccacgccgatgtgttcggagccgaacatcatgcgggctccgtcagcggacaggggtccggtggcggcacgcccggagaagttgtctcggatttcgccgcccaggaactcggcgtcggggcgttgggtccccagatcgacgtggatacggcaggcggctgccatgcgcagcagggagccgatccagccgaaaacggggcattctccgggcatcccagagaccttgatcgttgaccaccagtttttcgcgttgccgtagaactggcggtactcgtcgatgaggaccagcacgcgggtgaagtcggtctcgcgggccccttcttcttcgatgcggcggtagcggtcctccatgagagaccacagccagtggatgagggcgacctggtcggggacggtagtggcgaccatctcgatgttgggccactcccgcaggcccaggtactcgatgcgtttagggtcgatgacgaagacgcgccagttgcggcgggcaccctcgacggcgtcgccgatcatggacaccgtttttccggtacgggtgcggccggccttgagctggtgggccatgacaccggagatgtcccagaaacaggtgttgccgtcctcgtcgacggcctgggggattttctcccagtctggggagtctgggcccggaagggccacgggtcggggcaccatcgagggcagggggtggcggcgggtgacggtgatggtgtcgtgttccaggtcgaagtcgctgcgccactggccgagcatcatcgccgaggtcaccgcggccaggcgcaattggatgttcgggctggacaaatgggcgccacgttggtggtgaatggtgaagccgtccaggttcccccgatcggttttccaggaatcgacggtgaccgccgacccatagatctgagtggctacttctttagcccgttccttgtctcggtccagatcggttttgtcagggtcaggggtcggggcgcggtattgcaggacgaaccggccggccgggatcgttgcggatgtcaccgtgaactctgccggcgaccaggcagccgcggccgcctgggtgagggccattggcatggtctcgacggcagcctcctcgggggggatggtgagggtcaggcgtcgcggatgcgtcttcttgcgattccatgtgactttctgcttcaccggcaccttcgccgccgactgaatggctaggcgagctgattcggcagtttcggtacgccggccagcgcgtagcgcccgtcgtgcgtgaaggctgcccaccacagcacagcccatacacggcagccaccagcgcggatcagcggctgctgcatagcccccggtagctagtaccgcacctgaccagccggccgcgatacttttccacgccggtttcgcgccaccaggaccagcgttatggacggtctgcttcgaggctgcggagggacgagacagcggagtgctggtcatgccgcggcctccttgtggcaggtcatttcacaggcatgccggccagcgatgatgccgtggcgcaccgccccggtagccgcatagaccgcgcacaactcaaacacggggcacccatcgcaggccgccgggttcatgctttctttgtcccacgatggtgggtcatcggtgcacggcacggccaggccatcctgttgagcggcgctgatagcggtgaataggcgcagctgggcgcgaacttggtctggggtcaggttgacggtgcgggctacacgcatggggttccttcctcttcaccagtgaaggttccctagacccggccgatgtgcggagggatttcagtgttttatcgaggtgaccagccagccggtctgcgctgcgggttcaggtaccagggtcagatgcagcatggtgtggtcggctaggggcacggcgaccaggggcccgtcggcgctcgccccggtgagggtgggagttccggccacggtggtggcgggaatctggttgggtttcgcggccatcagggagcccatgagggtcggggcggcgatctggacgagggcgactttgcgggcggcgggatcgcgggtcaaccagccgcgggtgaaggtgagcgcagccgacgtgatatcggggctcagcggggctggtgtggcggcggggtgggccgttgaggagggccatacgcgcggtagcgctggcgacatcgagcgggtcggagtggggtcaggtgtagggcttagggtccgatgtggcgatggggctaccgccccggtggtgggagacgagactggttgggggtggtgttgagggcgtgggatcagggtgaaggcagccaaactggccgggatgaggatgacggccgcgccgacacttcggagcgaggtcatgtgacgatccttcggtagctcgacgggttgccgtagatcttttccacgttgatgccactatgtgggttgtcggcgctaaccatttggcctccaccgatgtagacggccacgtggtgggcagggcttccccagaggatgaggtcgccgactttgagctggtcacgggccaccgcggtgccgactttctgctggtcggcggcggtgcggggaaggctaatgccgatacgccggtacagcgccgaggtcaggcctgagcagtcgtagccgccatcggctttgccgttgccaccccacacgtaggcgtaggagttgttgtcggcgatcgatttggcccatgccacggcttcggccaggttcttcgacacaccggtctcgttagcggccccggtggcacagttgtttgacaggtgccctgtagtagtggatcccactatttgtttggccatggtttcccatttggcgtaggcatcgggcagggctgagccttgcactgcctgagctgcctgcgtcagcggcatcttctgccagtcagcgatgtcgactaaaccgggaatgtggaatccagggccgccggccgatccggggccagcgtaggtgatggtgtggcctttcaagaacgcctcggtggcgtaggcatcattgttgacctgatccagagtcccgtaccagcccggcaggatgcgctgctgaaaggggccggcgtcaccgtcaccgttagccttcgctgaggtagggtcggccccaagatctgattcttgtttggcggtcatgatagcgatgaccgctgcctgggtaggcagtttgtcacgctggaccacagtgacgatggtggtcacgagctgcttctgcctggccgtgaggcctccggcacccacagtgcctccggtgacggtacccacgcaagcatccccgccgacactgccaccgccgccgccagagttgtcgtcgagggccccagagcctactgacagcagcggcacaatgatcacggtcgcgggcaagaccgccaggcccgccagcatcagcactgctgcactcaccacggcgatcacgtgagatgctttcaacgctgcccacctttcgctggtttgagggggcgacgcctgctggtacgcacaggcttggttggtccagtccgccgttggttggcaggcctgggtttgatcggcttgctgggacccggtttgggctccggagtcttaggctccggcttcacatgcctaggcacttcggctgcggtgggaggagtcagcacgtggcgtaccggcttggtgaccttctgggcacccgaaacaaccggcttagacaccaccttggcacctttgaccaccggtgcggctgccttcgcgccggccttcttgactgcacgatgcgctttgatagccccggcctcggcccggccaaccctgctagcagtagcatcgagggctctgtggcccgtcgttgccctcaccggtgcatccttgccctggcgggtctgcttagcgatcgccgacatgccgcctcgcaatgccgaaacatgattgtgggcgtgggcgatcgccgacatgccggccgtcgcgatttttgactggccctgcggggcccctgccccagcacgaatctgctggtaagccgccgacgtgccacgagcacccgccgccattcgcgccaccttcgcagccctagtcactcccgtcgacacgccacccgtggctaccgcagcagcacccgagaccacagtcgaggccatccgccttcgacccaatccggtgagcttgcgaccaccgctgcgcaccatccggcgagcaccccgcccagcccactggccaatcgccgacgccccttcggaacgcttgctgcgcatccaatcgttgatcttgtccctcagccccttctcgcccttgtgacgacgccacatggacatcaagaacccgataatccccacgagctcgagcatgttgacaaccatgaccttgatggcgacatcaccgtcagaggcgaaaaccgacttgatgatgagcatgaccacacccaacatcaccatcgacccgacaatgccgatcatcgagtacaagatcgaacacagatcccggatgagcggatctgtgcggccagggatagcccgcaacacgttgagcatcgacatgaacgccgaccacaccaacttgcacacgtagaaccagcacatgcccgcgaacaccagcaggaccacagccaaacccgccaccgtcgacgagtaaaagaagaaccccaccaaccacgaaccatccgcaatatcgccggcgtaatccgacaacccctcatcacagtcaccaaggtcgtcgcgagcatccgagacgtcatcgtaagggccacccttgagcacctcgatgtacttgtcgtggcacttcgcatcaataatgcggccatagttgagctgctgatgaaccggcgccacgaacgagtccacaatgatcgccgacagcttcggatccttcgagtctcccgtcgaggtcatgtcatcaggaatctcgacctcaccagcggtcgccgtcgcaggatcaaccgaactggtaatcatatgagacagcgccacaccgaactgctgggtgcgagccagcggagtagccaacgtcgtcgtatcgcctgcgaacttcgccaccggggccgccaagaaacccaacgccagcgccgcagcaatcgccgcacgcgcacccgtagcccacgcccctgccgtacgtcccctcatcatcttgacgaccacgcccacaccggcgcacgtcgtcagcaacgtcaacaccgttccaccccagctgtccgctcccagcggggccaaaaccttgtcgtggatgtcgttctgtaaccccaccagcggtccggtaatccacccgacccagctcatcgccacggtccagtccaacaaccggcacaacagggcaatgaccatcaggtacgtgttccaacacatgccaataatggaggcccacatagccttcagcggggccgtaacgccaccatcgtccatcgacatctggtactgaaacaagtgaataccgttggagtcagtcacattgaaaccgtcacccatccagcccagccccgggcccgatgccatggcaggcacactgctcagcgccaccaccagaaccagcgtggtgacgatgatacggaaccgccgctccccggccccggggcggcgtggatgacggctcacgctgtctcctggtcgtgctcgggcgggttggagctggcggcttcgcggtggggagcgtaggcaggtctcagtagtcgaatttcaccgacgttgccgtgttggtcggcgtacaggccacaaccggggcctccggggttgagggcaatcttgaccaggtcagcgaactcttcaggggacgttttagggtccacgcccaggaactcgacacctttctgggcgaggttgatgttgtcgcacagcaacacgatgcgatgctgaatgaggttgcggacggtctcgttggggtaatcggcctcggggtcgtgggagccggtgataagccaggcattggctcggcgggattcgcgcacgtactcgtcaatggcgtgggaggcttccggcgaggacgacatgtgatgaaactcgtcaacaatgaaagcggcgtcgcgggcccggtcgctgaagcacaccaggcgagccagacgggcaatgagcgcgtagagggctcggccaaacaccttgtgcgggggcagctgccgaaacagatgttctgacagcatctcctcggcgttaggaagagcgatgccacaagtgccaatgatgaggatgtcggcactcaggtcggcgggaggaaggtccgggtcaaagatggccgaagctagggaggccgagttctcgatgtcagcgaacacggcaatcctgtcagcgatcgcggtggcctcgggaaggtcgcactcctcggccaggtggcgggccaaacgcccacacgaggtgatctggtggtcacgcatgtaggccggtttgaggaccttggccagcgtggtcccggccacaccgatggtctccaagttaagcaaggtcagcaagaacgactgggcgacctgcccggccatctccgggggaaggatgcgcagcgggtccagcgacagcttggggtgggccgtgtcgacgatctggcgtctaaccccgtcgatagagttgacaaaggttacccactcccgctcatcggagttgtcggtggcaataatgcgcccgccccgggccgcgatggctgcgcacagccgcttctcggccatcgtcttgcccgcgcccatcttgccgatgaacgccaccgtgttgcctttctgatcctgagtgtcggcatgcaaatcgaggtaggccagcgactgcaacggggagcctgtgaccacagccaacgggatgccggtggtacggcccaaccggtactcaaccaccgggatagatgcggcgaacgcggaggcgtgagtcagctgacggtaggcgttaagcgaggaggagaaccggccaccgggccgggcagcccacagcaagtcctcctgacggcccacgggacgcacccacgtgaagtcaccgaacaccggatcattgacgaacgctcctgccagctcctcggtggtctcaaagtcaggagacgagacagtgacggtgataagagcctggatctcgacctcacgctcatcggcggccagctcggcgttgtagtcgacgagcacctgagcggaatgctcgatagacatgagggtcgaagcctgggtcatctcaccgccctcgacgttgtcgagctgatcgaccgtttgacggatagcccgctgatttttctgcatcgcagcgtgacgggtccgggccactccccggatcgccacgtcgaccggcacgccagtgtcgtcgatacggcccaaaaactcgtaggcaggccacgtcatcgtgcggggcaccttacccagcacgatatgggactggtagacggtctcgccggtgtcggcaccgattttgaggacgcgacgattccacgcctgagccgtccgggacatgtgggagactcgcttgtcatcctcgctggccagcaggtcggaggtcgcggcctcatcgatgaccaactcccccagcgcggcacgtccaacctcatccatgagggcgattccctcgccaggggcatcatcacgcaaccgggtcgggtggcctgacaggtgctgccgaagccagatctgttcatcaacggtgaccgggcggggttggaacgctgccggcagtttcgcaccgaattccttagcctgacggagggcccactcccgtgcgacacggccaggagcggtggtcatgagtccggcggcttcggtgattttgttgagggcggcggtccaggcggtgtgggtgcgtattttctggtcttggttgagtttgatcgataggaaccacacgcgccggcctagggattcggtttcaggctggtcgagggtggcgtcgatttcgtcggcccacacggggtgttcgctcaggtcgaggccggcggccatggcgtcgacgatttctgtggggtcggtccaggtgagggctccgttgaggcagaactcgtggcgggcgaggtggcggaataggtcgcggtgagctgcggcgacggtgagggaggcgttctcggtgacgggtcgctggaggggagtgagtcgccaggtggcccagatgtcgccggtggaggtccagacgaggttgtcgaagaggaaccgttcggggatggacatcatgactccttttcggcggcggcgaggaaggcttccaggccgctgcggcgtacagcgttcccggtagggtgcaggggttttctgggggtgggttcagatttcgaatgtgggaggggtttgtggatggtatcggtgtcctcggcgagggcttggtcgagcaggcaggtggccggggtgtcggtagtctcgtccagctcgtcgatcatctcgtcgaggaggttgggggtggtggatgcggcccacacaggtgggatagccggtgcgggtcgaggcggtgtggggaggcggagtttggtttggccccagaggggtgtgtgggtcatgccggcgggagtggtggcggcgtgagtggtcacacgccaccagcccgccagccatgccagaggtgaccaggtccagtcgatgcgaccaacaacgaactgggcgagccatccggcagccagcgcgaaaatgaaaccgcggatggtcatgcccccgtcgataattttgaagcccatcattgcggcaggaactacgccgccgacagcgagcacctgatagatcgtgtagggcccgccaggaatccttcgacctgaggaatccttaccgataatgcggggctgctggcgggcctcggtgtgccactgaatatccacgatcagctcttgcccaatccttgcatcatctgtccgaagaattggatcgcgttaccttcgataagccagtgcgccataccacacacaaacagcatggagacgatcttggccaggctcataccgtgtttgaagatgttgaacgcggcaatgcccacgactacgaccatggcgacggctcgcaccgcggactgaccttcacctgccttgatcgtcgtccattcgaagaggttctgcgattccagtggcagcaggaggaattgatcgagcatgagaggttttcctttcaggaagccgaccgggatggtcccggtactgacgggctggacggcacgggtgtgccggccaggggcagaaggcgtgacggctggtcgagggaggcaacctcccagcggcctgcacggctgacaagagtcaggccgtactggctggtccgggtagtggattcgtcgccggtgggctggcatgtcacggtcaccgtgacggtaatcttctgccggtctgagggggtggggacctcgtcaggtcccaccacatgagtggttttcactgatacgcatggggctgggtcaaccgcggtgaaagcggtccctgggctgctccatctcgacaggtcagtattcccggtcagcatggcggttaggaagcctgaagaggcttgggcggccgggtcggcggtgcgaagctccgaggtgtctaaggtgggggccgaggccggtgcaggcatggggatctgtccaggtagacgcaaggcgatggccttgccgttggaatcgacgtggaccgggactgaccaggcctgtccgctcccggattggccgcccatggtgaccacggtgacctgccacaggctcggatcagacggggagacggtagcgtcataggcggtgacggtggtgggcgctggaccaggtttgcggggcatgcgcgcatcggtgatcttggccgccaccaggtgttccagattgtccaagtgcccggagtcagaggtcagcagaagagtagtcacctcgaccgcggtggctgaggcgatctgagctgtgcggcggtcgtgatgggtggtgtcagtgctgacagctgtggtgggagcggatgccggggccgccgaacggaccagggcaacggggccgcatgcgactccgcacagcacgagggcaaggaagcctttggtggccatcgatccggtgtggggccagggacccacgttttcctgtgcctgttttttcttggccgaccaacggcgggacttagggttagcggatgcaccttctggggtgcatgctcgtctcaatcgcatcggtcacctccttcactggatgaagggaccaaggaggtgaccgatgtgcggtcgaacccgaaaaagttcaaacttttttctgggtctgcctcaagtacgacagaaggcctgcatcatcacggcgttgtggtagcagatcttgcgtcagcgcaaatgtatgggcctcgtaggagtagctcttaggtgggtcccggtggttgcggccagggcgagggtgtcgggtatgtgtagcgctagtcccgggttcgtggtgtgagggcttttgggtgctgacatgcactacccattgctagacgctgtgctgtggcatggctggacgtctagcagacgggttgacatcacctttaggctggcagcgcccgaggccgcaggccagaggaagcggacagcctaacgattgacgtccccctctcctttccccaacctcctgga

SEQ ID NO: 203 - DNA, 9476 bp, Propionibacterium acnes
tgtgtgggatcagctgtgccgctcccccgacatggcagacagcaccgttgcatgagaactgactgacactgtggcgccgcggaggtctcccgcggcgtccgctggggcgagtgcatgcctgtcagctcatcttttatcgtcatgtttccccttgtcagagcggtctttgcaaagtgacaacgtcaggggtcttgacgacaacatcctcgacaacatcgtggcggtggtctgtgtctcgtcagttcaacgcaccggggaaagaggcaccgctgatgttcaccaccacaaacaccctcaacgatgagtgggaccagattcgcgccactgagatcgattggcatgactgccctgaactgatgcactgcatcgacgttgatgatgtgttggccgtcattcctgccgcccccgacgccatcttgggctacctcattgcccgggctcagggcggtgacgagttggccacccgcactatcatccaagcgttcacaggcaagcttatcttgatggccacggccaccaaggtgcgccgtactaatgacggcttcaatgatctgttggcgggtctgtgggagacgatcatcacgtacccgttggatcgtcgccctgacaagatcgctgcgaacctcatcctcgacacgttgcaccgggttacccggttctggcgtgctgattcccccgatgaggaagaggctcacggtctggtgcccttccctgacactctcatcgccccagagcccgatgaggacgtcacagctagccaggccatcgccttggcggtggaccgcaactggattaccgaggacctagcccgcctcatgagccatatttactgtgacggtatgactggagctgatgcgggtcgtctgcatggctgcgctccagctacggtgcgatctcgatgccgtgatggtcgggccgtgttgcagcgcaacgccgagacgatcctggccgtctgctgatccctctcttgctcatgcctgccgccaccctacccctacctgctagaaacatagccatgtctccagcaacgcatctagcatatcttctagcaattgatctagctatgtatatagctgatgatctagctatcatatagctgtgtctccagcccaaaggacagcccaatggcatgcttgccacaggaaggtgcgtcagcctcccgaaatactggaaggagctttaccgtgcaggacatgacctcgaccagaccgattgaccgatccccgttcgaccgcactattgcggtgtggaaccacaaaggcggcacgttcaagacgtccgtcgtggcgaacctgggatacctgttcgccgccggtggcaacaaggtgctgctggtcgacatggacccccaggccaatctcgacattgacttcggtatacccgcgggagaacgtgaacggggcatgggattagccgaggcgctacgtgaggggacggcccttcccccaccgcagcatctcagcgaaaaccttcacctggtcagtggcggcgctgctctcaacgagttcaccgaccccgcatccttagcggccatcctcgaccgagtcaccaccgcacgctacgacctgctagctcaggcccttgccccgctggcctgggactatgacctcatcttcatcgactccgggccggcacaaactctgctgtcccagaccatccttggagtagcccgctggctggtagtgcccacccgcaccgataacgcctcaatcactggcctcgtcgacgttcaagacgccatcgacggggttgcctcctgcaaccctgaccttcaactactcggcgttgtcctagccggcgtgggggcccgggccacccggatcgccgcagataaacgccacgccatcgacacagtgctgggggcaggaaccgttttcgatgcggtcatccactactccgagaaggtgtccgtgctcgcacgccagcagggcaagaccgtcgccgagctagccaacgagtaccacaacacccagcccgcctacacctacctagctaaaggccagaacatccccaacgtcgccaaggcagccgtcagcatcgaaactgattatctgaggctggccaccgagatcagcgaccgcatgttcaccagcgacgagcaggagcctgatcatgactgacgatccgactccatccgagcagaacaaccccaccagcgacgacatgcgcttggccgaagaatgggccaacagcggccgcacagtgggagccctgccgcgccgtcaacggcctcagcgacccacaccccgcaccaccagccaaccccctgtctcgtcccctgacacaccggctccgaaaaaaccccagaagacccccaccagccagcctggccgtcaacggatcaacgtcaccgtctacgttgtgcccgaactccatgagcggctgcgctcccgatcggcggcgacgggggtgacggtctcggatctggtggtgcatgcgttagcgttcgtcgccgatcatgcgggggaggcgatcgccgatgatctgcgcgtcgagacgggccccggcatgggggccggactgttcgatgtgaccccatcgcggccagtaggggtcgccaaaacccagctgggggtgcgaatgacccgccacaacaaggatggtttggaccagctgacccggacgagtggagcccgtgaccgcagccatcttgtgtctgtcgccgtgcgcgactatctcgactccaaccctgtaaagaaaggccgacatgtccgctgatgaaactcctgccgcccggggtgggcgacgctttgatacgaccgtcaagcccaggcgccgtcccatgcttatcgccgccggtatcgccatcgtgatagtcggcgcgctcctcatcactcagttgattcgctccgcccaaaccgagcatcgcgtgctggaagtccacgccgatgtggctcgcggcgaggtcatccgtgacaccgatctggtatcggtgactgtcggccaggtcgacaacgtatcaacggttcccgcagaccagctcgactcactggtcggcaaacgcgccacggcagatcttcgagccggatcactcttgcctgctggggctatcggcccggccgatgtcgttccagctccgggcaagtcgctggtcgggctgaagctagccgccggacagatccctatcggagaccttgctgccgggacgaagctgcgcctgatccagacgtcggcacccagcggctcatccaccaccactgatagcagcaccaataccgatggccagtcgtgggaggcaacaatggcgaccggcaccaaaaagaccgagcaggtcaccttgatcaacgccgaagtgaactcgcgtgatgccgcccggatcgcccaactgacgtcacagggccgtatcgccgtagtgaaggatccgatccgatgagcaccattgttttgaccagcgtctcgggagccccaggggtcaccacgacagcgatcgggctgggcagggtctggccacaatcgagcctggtcgtcgaggatgacacccaccacgccatgctggcgggctacctgcgagcctcccagcacgccgaaccgaacctggccgcagtggcgaacctgacgtcgactccaaccaacgcccaaacggtgtgggaatctatcgccagacccctacccaccgatgacccagtcggcgggctgcgacgcaaaggcatcctcggcccgcccacgccgtggtctcgcgcaggcatcgacccccgatggggattcatgctggccctgtggcggcaactggaggaggctggcatcgacaccatcatcgatttgggtcgcctagccacaccactgacctcaacgccacacctgatcgccgcacccatcgtcgaggacgccgacatgatcttggtgatgatcgaggcgacactacgcgacatcgccggcgcccgcacgatggtggagggactcgctgagcagatgaacttggccggcgcctaccgacgtctcggactgcttgtccaccgtggcggccaggcccgcggcgtcgccgagttcaatgacaaggagatcacctcggcgttacgactcccggtcatcggggccattacccacgacccggccggagccgcccaactctccgacggggtcgggcagcggttcgacaagtcacgtctggcccactcactatcaaaggtggcggccagcctcgtcgatgccataaacaagcgccacgctgatgacgaggaggatctgtgatggccagttttgctgataatccgttcgacaagctgcgctcccaggatgcggcaagagcttcggtagagcaggagcctgatgccggattagcgtcggagttgttttcgacgtcgtcggggtgggccagctctcagcaggtgtcccaagctcaaccggtgatgacccgttcggagaacgtggattggccggttgtcgcggagctagccagtacggccactgatgaggttgaggctgagatcagcaggtggagttccactcatgatggggtggcgacgctagacattcgccaggccatcgcggagcctgctattgcctcggcggtgtctacgtatgctgaccgacgccagatcgatgtaggggagacctggcctgatctggtacgccagcgataccgcaaggctgtgtgggatcagctgttcgggatggggcggttgcagccgctgttcgaaatcagcgacgccgaaaacatcatcgtggtgggtaaccatgaggtggttgtcgaccacaacgatggttcccggtcaacgctgccgccggtggccgactcggatgccgagctggaatcccagatcgcccggatggcgaggaatgcgaccccgcggcgagccttcgacgccgatcacaccgatgtgacgatcatgcaccaacagaagttccgtatccacgcgatctcttcggaggtgtcgttgcaaccgtcggtggtcatccgccaacatttgctcacccaaatcagtctgggggacctgtcccagcggggaatgatgccggtggaagtggcccggttcctcgatgaggcggtacaagctggcaagtccatcgtggtcgccggcgagcagggggcaggcaagacgacgtttttacgagcgttgatccacgccattccgatgcgggagcggttcgccacgttggagaccgatcaggagttgttcgctcatctgatgcctggccgggaaaacacgctggtgctgttcgcccgtgatggtaacggcgaggtggatccggcgactggcacccagcacggcgctatcgagatcgcccagctgattcctcctagcctgcgccaggcgttaactagggtcattgtcggtgaggtgcgcggcaatgaggcttcggccatgttccaggctatgcagtcggggactggcactatgagcagtatccactccccgcgagcctctgaggtgccgtcccggctagcccaaatgatttcgatgggcccggtctacgatctggatcaggccatgctgcagatcggtcattcgatcgactacatcgtctttgttcgtaagcgtgacctgcctgatgggagccggctgcgatttgttgagcagatccgttcagtctcgcctggtgattcgacaactcccagtcttggcgaggtgtacacggctgactcgtggacaggccagccgcttacgccactcatgcctggttcggccgccgacgagctgtctcacttcgcccgagacctggattactgcgaggcccactcatgaacactcccgcactaaccagcgccctcatcgtgaccgggttggggctgatcctggccatcgacgggctggtcccggcgccgcctcgacctggtgccccgctgagcccggcccagaggtgggctcggctcacccaccgtcccacaggagcggccgggcgtcgccgggatttgcgttgggggttggctgttctcgtcggcgtcgtgctgtttgtgctcaccgggtgggtggctgcgctggcgttgggccccatcattgtgttgttggcccccaccctgctgggggcggccccaccgaccgatattccgctgatggaggcgttggatcggtgggtgcgtcaggtcgctgcggtgctgccacaggggcgagacatcatcacagcggtgcggatctcacggccgcgggccccgaagctgatcgccgggtcggtggatcaactggtgtcccggttggatggccgtatggagccgagggaggcgttccagcggatggccgacgagctggactcggctgaggctgacgcggtgctggcctcactagcgttggcggccactcatccgcggggagcctcgacaacgttgaaggctattgctggcaacatccaacagcggttgaaagtgctgcggcaggtggaggctgagcggtctaagccgcgtaactcggtgcgccagatcacactggtcacgatcgccatgttcggggggctgctcgtgatcggacggtcgtttctggccccgctggcgacccctcccggtcaggtgctggtggccgtggcggtggtcatgtatgtcatcgcactagtgcagatgtatcggatggcgcggccccgtcgacgcacccggatcatggtcaggaggacccgatgaccattactgctttgtccctgctggccggggccatcgtcactgtcggactgctggtcatcgtggcagcgttccgcccagccccaggccctgacctggttgccgctctggaggtggtgtcgggtcgcacctcaagcgtcgccgagaacgtcgaccagacccggatcgggcggataggtcgcagcgtgacccgcacattccatgtgtcggtgtccccggccatgcgggccgcactgcgactccaaggcacgacccccgaagcgttctacggtcgacgcctgatctgcgcactgatcggggcgatcctgccgtggctgctcaacgcggtagccatcgcggtaggggcgaattccccgaacctactcatcccttcggcgctgtgtgtggcgttagctggcgctggatggatgctgccggcagcacggttgaaggctgcggccgggcccaccaacgatgactcgttcgaagcgctgctggtattcatcgatttggtcgtgctggaacggctcgccaacgaaacctccgtcgacgcgctcaccaatgcggcaaacatgtcggactcgccgctattcgtccagatccgtcaagtcctcaaccgtgcctccctggaaaacgtcgacccgtggaacgggctagaccggctagccgaggacatcaaactgcccgaactcaccgatgtggtctccatcgcccgcctccaaaacgaaggcgcctccctcgtcgacagtttccgggcccgagtcgccgagttgcgcgacgcctacctgctgcgcctgcaacaagaatccaccgccatcacccagcggcttggtttgtggacgatcctgcaagccggctcggtcatgctcatcttgctgggggcggccgccctcacactcatcacagccggataaaccgacatcgtgtcgagcccccatatgggccgcgaacctttcataatgatgcctgtaagcaccacaatattgatcacaacctaacaatgaaggagaaatcatgatgaccgatctcgacctggctaaaaaacagatcacctggctggcggcgcacctgcgttcccggatcgttgacgagcgtggcggtggtagctctaccgtggagacactgatttggattggtgtcatcgtggcgctggtgattggtgtgggcgtcggggtgacggcctatatcaggtcgaagatgcctcactgacgacgatgcgtagcaggttcacaactgatcagcgtggcggtggtagcgcgtcggtggggatgctcctgctgatgcctgcgatcatgctgctggcattcggtgggatcgaggtcgggatgtggtgtcacgcccatcagtcgaccatcgcggcagcccaaagcgccgcggaggctcagcgtgtcgtccatccggtcccggggtcggcacaggaggcagcctcgcagatcactagtcatggcggggtgcgtgatacccggatatcggtcagtgatgacggggccactgtcacggtgaccgtctcaggtcgggccccatcgatgctggggctgcatcttccggctgtgtcgtcgacagcgtcgatgcccaaggagcgcctgtcgtgaggcgaagtgagcgcggtggagcaagtctaagcgtcgaggtgctcatgtgggcgccgatcgcgctggtgatcatcgggtttgttgtgggtatcggccggatgtcgatggcccaggacgcggtgaatggcgcggcgggtgctgcggcccgtgcggcgtcgttggagcgtgatggacagtcggctcagtctgcggcgcagcaggcggcgtcggcgaacctgtcgtccggtgggctggcatgtgcgccgagtgtgagcgtggacacgtcagtgtttgcccgtcctgccgggcaggcgggcacggttcacgccacggtcacgtgtgtcacctcgctgggtcttgggttcgggtcccggacggtgcacgcaacggggtctgccccggtagacacctatcgggaaaggagaggctgagatggcccgtgatgagcgtggtggcggctcggtgtcggtgtggatgctgctcatggtgccggtgattctggtcatggccggcctggtttttgacgggtcccgtcagatatcggcaacccaggcggcccaggacgcggcggttgcggcatcccgcgccggaactgatgcggcagcgacaccgcagcttgctggccacgacggggcggccgtagcagtccaagcggcccgccaggcactatctgctgccggggtggacgggtcggtgcaggaggacgggtcgaccatcacggtgaccacgtctcaaagtcggccgacagtgttcctgtcagcgatcggaatcagccaggtaagggggcatgggcaggcccatgctcagcttgtgggaccgggagaacgcccatgacagtgatacgtcgtatcggtgccctggtggcactgctggtggtgatagccggcttaccggccgggctcgtggccgcaggcgccccgctagtaccctcgggcctgtcatgggcccatgtgcggcatctgttggttaccccagacatgaccgggtcggtgctggtgtggctggtcagcctcatcggctggatcgggtgggcatggttcgccctggccgtcgcagccgaagcggtgacgatgctctcagggcagcggctgcactggcacatgcccggccctcgcctagtgcgccgagtggcagccggtcttctcattgccgcgttcgcggccgcaccggcagccacaagcacggctcacgccgccgaggccacccatgtggcggtcgccgcccaggctggaccggcacacgcggcccccgcccaggacagccccgccaccacctctcaggccccggacgcctccaccactccgaaaatctggaagacctacacggtgcgggccaacgactacctgtggaagatcgccgagcactactacggtgacggcgcc

SEQ ID NO: 204 - DNA, 12539 bp, Propionibacterium acnes
ccccaatgcccccacaacgatcagcacaccaacagcgatcatcaggtgggcagcactaactgatcccaacggaccaagatcaaacaagccctgcccgggagcgccgagcagtccgtgggcgcgaagccatgctccgagattgccaatgatcttggggatcatcttgttcagtagggctatccctccgatgccgacaacgaggaagacgaggatttcttcgcctgcgttgtttcttcctgtgtttgcggtcatgctgccttctcggggtggatggccagccagctgatgaggttgtcggtgatctgccctgagatttggatcagttcgacttgcccggcctgccatgcccgcgatgtgccggccagcaatgatgctgggacccctactgcgcggccacgggatgcaacctcagccaaggcggcgcgtaactcctcgacggtgctttcgatgtaccaactgccgtcagtactagtctcagcggcatcggtggtagcgataagagcatcggtgaggtcgtcgacggcgcggtccagatcagcgatgtccggtagggctacaggagtcatggtgtgtcttccttctagggtgccttcactggtgaaggttccctagacccggccgatgtgcggttctgtgggaaaaatgcttcccattggtccgtcttagttaggaaacttggcctaagtgctgtcgagggtcgcgtgttcgtgaccggttcgaagacactgccgccttgccttcttgcccgtggcgtttccgagatggggtcagtgggcgatggctaggccgatgagggcgccgctgcacaggctgggtgcccaggggaggaatcgggtggtgtggtgtcggcagcggtcgatgagggcatatagggcgatcagagtcagcccggctatgacagtgacctggatcgtgtcgatgccggttgctgcggccggggctgcccacagtggtgtgatgcgcacgtcggagaagccgaagccgcctcgggagatgagccaggcgatcatccacgctgcgaagatgatggcggtagcgatgacagcacgtatcgccgcagtatggtccgagagggcggtaacgactacagccccgatccatccggcccatccggtccacgctaggactgccggtatccatgtggtgatggcgtcaatgacggcaacccatgccccgatggtggctagcagggcccacgtcggccacgtgggtgctggggcccacattgtggcggcgatcatggtgaccgcagccgcggcacagaccgcgatcaagcttcggagactgtaggtgtcgcggtagacgatcttgtcggggctggcggtagctggttcgggcaggacgcgggtgagggcaggccatcctgcgaccgcaatagccgcgacggcgaccacccacacgatctgttgcatgggtctcatcatggcccatcatcgatgagtatgggtggccgacatggggtcactcgtagaggggatcgaggggtgtgcgggcgagcatggcttcctgtgtgccgagcatgagggtgccagaatcctcgccagccgattcccagtcgacgatgacctggtcgccgtcaacgctggattcggcgatggtcacccattgcccgtccatgtcgatgagcatcccggcggccagctctgtggcggcaaccgggtgggctgggctgtagaggaggtcgatgtcgcgggcagggtcgtcgggttcttcggttacctcgggtggggtcgatctggctgtctcggtgtcgtcggccaggtcggctcccaggatgcgttcccattcggggctggttttcttgcccgctgaggccatcgtctcgtcgatctgttcgtcagtgggccacacaaatttctttttggtccaggtcgtggtgtcgggtcgcagctgatccagcagttccaggtcttgcggggagtgggccttgcgggggtcgggggtgtagaagaattggacttccttgggggctgattcgccggataggtaggtgccgcggccgcgtttgccgaacgggattcccacgccgacgtgttcggagccgaacatcatgcgggctccgtcagcggacaggggtccggtggcggcacgcccggagaagttgtctcggatttcgccgcccaggaactcggcgtcggggcgttgggtccccagatcgacgtggatacggcaggcggctgccatgcgcagcagggagccgatccagccgaaaacggggcattctccgggcatcccagagaccttgatcgttgaccaccagtttttcgcgttgccgtagaactggcggtactcgtcgatgaggaccagcacgcgggtgaagtcggtctcgcgggccccttcttcttcgatgcggcggtagcggtcctccatgagagaccacagccagtggatgagggcgacctggtcggggacggtagtggcgaccatctcgatgttgggccactcccgcaggcccaggtactcgatgcgtttagggtcgatgacgaagacgcgccagttgcggcgggcaccctcgacggcgtcgccgatcatggacaccgtttttccggtacgggtgcggccggccttgagctggtgggccatgacaccggagatgtcccagaaacaggtgttgccgtcctcgtcgacggcctgggggattttctcccagtctggggagtctgggcccggaagggccacgggtcggggcaccatcgagggcagggggtggcggcgggtgacggtgatggtgtcgtgttccaggtcgaagtcgctgcgccactggccgagcatcatcgccgaggtcaccgcggccaggcgcaattggatgttcgggctggacaaatgggcgccacgttggtggtgaatggtgaagccgtccaggttcccccgatcggttttccaggaatcgacggtgaccgccgacccatagatctgagtggctacttctttagcccgttccttgtctcggtccagatcggttttgtcagggtcaggggtcggggcgcggtattgcaggacgaaccggcccgccgggatcgttgcggatgtcaccgtgaactctgccggcgaccaggcagccgcggccgcctgggtgagggccattggcatggtctcgacggcagcctcctcgggggggatggtgagggtcaggcgtcgcggatgcgtcttcttgcgattccatgtgactttctgcctcaccggcaccttcgccgccgactgaatggctaggcgagctgattcggcagtttcggtacgccggccagcgcgtagcgcccgtcgtgcgtgaaggctgcccaccacagcacagcccatacacggcagccaccagcgcggatcagcggctgctgcatagcccccggtagctagtaccgcacctgaccagccggccgcgatacttttccacgccggtttcgcaccaacagtcggggcagacgctggccgcttcgagaccgaggagggacgagacaagggagtgctggtcatgccgcggcctccttgtggcaggtcatttcacaggcatgccggccagcgatgatgccgtggcgcaccgccccggtagccgcatagaccgcgcacaactcaaacacggggcacccatcgcaggccgccgggttcatgctttctttgtcccacgatggtgggtcatcggtgcacggcacggccaggccatcctgttgagcggcgctgatagcggtgaataggcgcagctgggcgcgaacttggtctggggtcaggttgacggtgcgggctacacgcatggggttccttcctcttcaccagtgaaggttccctagacccggccgatgtgcggagggatttcagtgttttatcgaggtgaccagccagccggtctgcgctgcgggttcaggtaccagggtcagatgcaccacggtgtggtcggctaggggcacggcgaccaggggcccgtcggcgctcgccccggtgagggtgggagttccggccacggtggtggcgggaatctggttgggtttcgcggccatcagggagcccatgagggtcggggcggcgatctggacgagggcgactttgcgggcggcgggatcgcgggtcaaccagccgcgggtgaaggtgagcgcagccgacgtgatatcggggctcagcggggctggtgtggcggcggggtgggccgttgaggagggccatacgcgcggtagcgctggcgacatcgagcgggtcggagtggggtcaggtgtggggcttagggtccgatgtggcgatggggctaccgccccggtggtgggagacgagactggttgggggtggtgttgagggcgtgggatcagggtgaaggcagccaaactggccgggatgaggatgacggccgcgccgacacttcggagcgaggtcatgtgacgatccttcggtagctcgacgggttgccgtagatcttttccacgttgatgccactatgtgggttgtcggcgctaaccatttggcctccaccgatgtagacggccacgtggtgggcagggcttccccagaggatgaggtcgccgactttgagctggtcacgggccacagcagtgccgactttctgctggtcggcggcggtgcggggaaggctaatgccgatacgccggtacagcgccgaggtcaggcctgagcagtcgtagccgccatcggctttgccgttaccaccccacacgtaggcgtaggagttgttgtcggcgatcgatttggcccatgccacggcttcggccaggttcttcgacacaccggtctcgttagcggccccggtggcacagttgtttgacaggtgccctgtagtagtggatcccactatttgtttggccatggtttcccatttggcgtaggcatcgggcagggctgagccttgcactgcctgagctgcctgcgtcagcggcatcttctgccagtcagcgatgtcgactaaaccgggaatgtggaatccagggccgccggccgatccggggccagcgtaggtgatggtgtggcctttcaagaacgcctcggtggcgtaggcatcattgttgacctgatccagagtcccgtaccagcccggcaggatgcgctgctgaaaggggccggcgtcaccgtcaccgttagccttcgctgaggtagggtcggccccaagatctgattcttgtttggcggtcatgatagcgatgaccgctgcctgggtaggcagtttgtcacgctggaccacagtgacgatggtggtcacgagctgcttctgcctggccgtgaggcctccggcacccacagtgcctccggtgacggtacccacgcaagcatccccgccgacactgccaccgccgccgccagagttgtcgtcgagggccccagagcctactgacagcagcggcacaatgatcacggtcgctggcaagaccgccaggcccgccagcatcagcactgctgcactcaccacggcgatcacgtgagatgctttcaacgctgcccacctctcgctggtttgagggggcgacgcctgctggtacgcacaggcttggttgatccagtccgccgttgattggcaggcctgggtttgatcggcttgctgggacccggtttgggctccggagtcttaggctccggcttcacatgcctaggcacttcggctgcggtgggaggagtcagcacgtggcgtaccggcttggtgaccttctgggcacccgaaacaaccggcttagacaccaccttggcacctttgaccaccggtgcggctgccttcgcgccggccttcttgactgcacgatgcgctttgatagccccggcctcggcccggccaaccctactagcagtagcatcgagggctctgtggcccgtcgttgccctcaccggtgcatccttgccctggcgggtctgcttcgcgatcgccgacatgccgcctcgcaatgccgaaacatgattgtgggcgtgggcgatcgccgacatgccggccgtcgcgatttttgactggccctgcggggcccctgccccagcacgaatctgccggtaagccgccgacgtgccacgagcacccgccgccattcgcgccaccttcgcagccctagtcactcccgtcgacacgccacccgtggctaccgcagcagcacccgagaccacagtcgaggccatccgccttcgacccgatccggtgagcttgcgaccaccactgcgcaccatccggcgagcaccccgcccagcccactggccgatcaccgagcccctttcggaacgcttgctgcgcatccaatcgttgatcttgtccctcagccccttctcgcccttgtgacgacgccacatggacatcaagaacccgataatccccacgagctcgagcatgttgacaaccatgaccttgatggcgacatcaccgtcagaggcgaaaaccgacttgatgatgagcatgaccacacccaacatcaccatcgacccgacaatgccgatcatcgagtacaagatcgaacacagatcccggatgagcggatctgtgcggccagggatagcccgcaacacgttgagcatcgacataaacgccgaccacaccaacttgcacacgtagaaccagcacatgcccgcgaacaccagcaggaccacagccaaacccgccaccgtcgacgagtaaaagaagaaacccaccaaccacgaaccatccgcaatatcgccggcgtaatccgacaacccctcatcacagtcaccaaggtcgtcgcgagcatccgagacgtcatcgtaagggccacccttgagcacctcgatgtacttgtcgtggcacttcgcatcaataatccggccatagttgagctgctgatgaaccggcgccacgaacgagtccacaatgatcgccgacagcttcggatccttcgagtctcccgtcgaggtcatgtcatcaggaatctcgacctcaccagcggtcgccgtcgcaggatcaaccgaactagtaatcatccgagacagcgccacaccgaactgctgggtgcgagccaacggagtagccaacgtcgtcgtatcgcctgcgaacttcgccaccggggccgccaagaaacccaacgccagcgccgcagcaatcgccgcacgcgcacccgtagcccacgccccagccgtacgtcccctcatcatcttgacgaccacgcccacaccggcgcacgtcgtcagcaacgtcaacaccgttccaccccagctgtccgctcccagcggggccaaaaccttgtcgtggatatcgttctgcaaccccaccagcgggccggtaatccacccgacccagctcatcgccacggtccagtccaacaaccggcacagcaacgcaatgaccatcaggtacgtgttccaacacataccaataatggaggcccacatagccttcaacggggccgtaacgccaccatcgtccatcgacatctggtactgaaacaagtgaataccgttggagtcagtcacattgaaaccgtcacccatccagcccagccccgggcccgacgccatagcaggcacactgctcagcgccaccaccaaaaccagcgtggtgacgatgatacggaaccaccgctccccggccccggggcggcgtggatgacggctcacgctgtctcccggtcgtgctcgggcgggttggagctggcggcttcgcggtggggagcgtaggcaggtctcagtagtcgaatttcaccgacgttgccgtgctgatcggcgtacaggccacaaccggggcctccggggttgagggcaatcttgaccaggtcagcgaactcttcaggggacgttttagggtccacgcccaggaactcgacacctttctgggcgaggttgatgttgtcgcacagcaacacgatgcgatgctgaatgaggttgcggacggtctcgttggggtaatcggcctcggggtcgtgggagccagtaatgagccaggcgttggctcggcgggattcgcgcacgtactcatcgatggcgtgggaggcttccggcgaggacgacatatggtggaactcgtcaacgatgaaagcggcgtcgcgggcccggtcgctgaagcacaccaggcgagccagacgggcaataagcgcgtagagggctcggccaaacaccttgtgcgggggcagctgccgaaacaaatgttctgacagcatctcctcggcgttaggaagagcgatgccacaagtgccaatgatgaggatgtcggcactcaggtcggcgggaggaaggtccgggtcaaagatggccgaagctagggaggccgagttctcgatgtcagcgaacacggcaatcctgtcagcgatcgcggtggcctcgggaaggtcgcactcctcggccaggtggcgggccaaacgcccacacgaggtgatctggtggtcacgcatgtaggccggtttgaggaccttggccagcgtggtcccggccacaccgatggtctccaagttaagcaaggtcagcaagaacgactgggcgacctgcccggccatctccgggggaaggatgcgcagcgggtccagcgacagcttggggtgggccgtgtcgacgatctggcgtctaaccccgtcgatagagttgacaaaggttacccactcccgctcatcggagttgtcggtggcaataatgcgcccgccccgggccgcgatggctgcgcacagccgcttctcggccatcgtcttgcccgcgcccatcttgccgatgaacgccaccgtgttgcctttctgatcctgagtgtcggcatgcaaatcgaggtaggccagcgactgcaacggggagcctgtgaccacagccaacgggatgccggtggtacggcccaaccggtactcaaccaccgggatagatgcggcgaacgcggaggcgtgagtcagctgacggtaggcgttaagcgaggaggagaaccggccaccgggccgggcagcccacagcaagtcctcctgacggcccacgggacgcacccacgtgaagtcaccgaacaccggatcattgacgaacgctcctgccagctcctcggtggtctcaaagtcaggagacgagacagtgacggtgataagagcctggatctcgacctcacgctcatcggcggccagctcggcgttgtagtcgacgagcacctgagcggaatgctcgatagacatgagggtcgaagcctgggtcatctcaccgccctcaacattgtcgagctgatcgacggtttggcggatggcccgctgatttttctgcatcgcagcgtgacgggtccgggccactccccggatcgccacgtcgaccggcacgccagtgtcgtcgatacggcccaagaactcgtaggcaggccacgtcatcgtgcggggcaccttacccagcacgatatgggactggtagacggtctcgccggtgtcggcaccgattttgaggacgcgacgattccacgcctgagccgtccgggacatgtgggagactcgcttgtcatcctcgctggccagcaggtcggaggtcgcggcctcatcgatgaccaactcccccagcgcggcacgtccaacctcatccatgagggcgattccctcgccaggggcatcatcacgcaaccgggtcgggtggcctgacaggtgctgccgaagccagatctgttcatcaacggtgaccgggcggggttggaacgctgccggcagtttcgcaccgaattccttagcctgacggagggcccactcccgtgcgacacggccaggagcggtggtcatgagtccggcgacttcggtgattttgttgagggcggcggtccaggcggtgtgggtgcgtattttctggtcttggttgagtttgatcgataggaaccacacgcgccggcctagggatgcggtttcaggctggtcgagggtggcgtcgatttcgtcggcccacacggggtgttcgctcaggtcgaggccggcggccatggcgtcgacgatttctgtggggtcggtccaggtgagggccccgttgaggcagaactcgtggcgggcgaggtggcggaataggtcgcggtgagctgcggcgacggtgagggaggcgttctcggtgacgggtcgctggaggggagtaagtcgccaagtggcccagatgtcgccggtggaggtccagacgaggttgtcgaagaggaaccgttcggggatggacatcatgactccttttcggcggcggcgaggaaggcttccaggccgctgcggcgtacagcgttcccagtagggtgcaggggttttctgggggtgggttcagatttcgaatgtgggaagagtttgtggatggtatcggtgtcctcggcgagggcttggtcgagcaggcaggtggccggggtgtcggtcatctcgtccagctcgtcgatcatctcgtcgaggaggttgggggtggtggatgcggcccacacaggtgggatagccggtgcgggtcgaggcggtgtggggaggcggagtttggtttggccccagaggggtgtgtgggtcatgccggcgggagtggtggcggcgtgagtggtcacacgccaccagcccgacagccatgccagaggtgaccaggtccagtcgatgcgaccaacaacgaactgggcgagccatccggcagccagcgcgaaaatgaaaccgcggatggtcatgcccccgtcgataattttgaagcccatcatcgcggcaggaactacaccgccgacagcgagcacctgatagatcgtgtagggcccgccaggaatccttcgacctgaggaatccttgccgataatgcggggctgctggcgggcctcggtgtgccactgaatatccacgatcagctcttgcccaatccttgcatcatctgtccgaagaattggatcgcgttaccttcgataagccagtgcgccataccacacacaaacagcatggagacgatcttggccaggctcataccgtgtttgaagatgttgaacgcggcaatgcccacgactacgaccatggcgacggctcgcaccgcggactgaccttcacctgccttgatcgtcgtccattcgaagaggttctgcgattccagtggcagcaggaggaattgatcgagcatgagaggttttcctttcaggaagccgaccgggatggtcccggtactgacgggctggacggcacgggtgtgccggccaggggcagaaggcgtgacggctggtcgagggcggcaacctcccagcgtcctgcacgactgacaagagtcaggccgtactggctagtccgggtagtggattcgtcaccggtgggctggcatgtcacggtcaccgtgacggtaatcttctgccgatctgagggggtggggacctcgtcaggccccaccacatgagtggttttcaccgatacacacggggctgggtcaaccgcggtgaaagcggtccccgggctactccatctcgacaggtcagtattcccggtcagcatggcggccaagaaacccgaagaggtctgggcagccgggtcagcaggacgaatctccgaggagtccacgtcgggggctgaggccggtgcaggcatggggatctgcccaggtagacgcaaggcgatggccttgccgccggcatcgacgtggaccggaaccgaccaggcctgtccgctcccggattggccgcccatggtgaccacggtgacctgccacaggctcggatcagacggggagacggtagcgtcataggcggtgacggtggtgggcgctggaccaggtttgcggggcatgcgcgcatcggtgatcttggccgccaccaggtgttccagattgtccaagtgcccggagtcagaggtcagcagaagagtagtcacctcgaccgcggtggctgaggcgatctgagctgtgcggcggtcgtgatgggtggtgtcagtgctgacagctgtggtgggagcggatgccggggccgccgaacggaccagggcaacggggccgcatgcgactccgcacagcacgagggcaaggaagcctttggtggccatcgatccggtgtggggccagggacccacgttttcctgtgcctgttttttcttggccgaccaacggcgggacttagggttagcggatgcaccttctggggtgcatgctcgtctcaatcgcatcggtcacctccttcactggatgaagggaccaaggaggtgaccgatgtgcggtcgaacccgaaaaagttcaaacttttttctgggtctgcctcaagtacgacagaaggcctgcatcatcacggcgttgtggtagcagatcttgcgtcagcgcaaatgcatgggcctcgtaggagtagctcttaggtaggtcccggtggttgcggccagggcgagggtgtcgggtatgtgtagcgctagtcccgggttcgtggtgtgagggcttttgggtgctgacatgcactacccattgctagacgctgtgctgtggcatggctggacgtctagcagacgggttgacatcacctttaggctggcagcgcccgaggccgcaggccagaggaagcggacagcctaacgattgacgtccccctctcctttccccaacctcctggagtcgatgacccggagatagatcgatgtctatgcatcggtgcatcgatatacctatgtatctgtctgtggtttttagaggccactcccgtcgccccgggccgctcagcgataccgcaaggctgtgtgggatcagct

SEQ ID NO: 205 - DNA, 2061 bp, Propionibacterium acnes
gcgagccacgaccatcgccaagctgaatggagagcgagcatgagcaccacccctgccgggttcgacttcgacgctctggccgagtgggccgagagcgatgaggcgacccacaccccgcaaaccagccctgtgttccggggcaaggacgccgcgcgcgccagccgcgcattcctcggccgaggacggcccaccctcggcgcggaccacgccaccggtgagggccggtcgccccgccgtcaggtacggctcgacgcacgcaccaacgcgcgactcgacgcctacgcagccgcaaccggcaccagcgcctcccagatcatccgcgacgccctcgctgactacctgcccgcctgatcccaccccaatccactcgggcgcctgtcagtgcccccctcttctgggtggtggtccggggcgtcaccgccccggaccagttgggtagtcatctcagttgaaataagcgattagtgatacgcccctcctgctttccggtgctgtcatgagcgtctgacaacagcgacacctcggggcagccgacggacagtcctctggctgccgctctgatcccatgcccacggcacgaaggtgtcggacagctcggtctcatcatgtgcccaaatagcgtcgtgggcctgtcgccaagcttctcgggagccccacacgggcacgaccgggccacaccggtgtcctggtctccagtgtcgcgacactgtcgatttcggtacgtgcaatgcggcggcggtttgacggatcgacatcccagactcccgcgcgtcccagatcgccatgtggagagtatttgcctccagtgcggccgccacacttgcacgctctcgcgcacgctcgaatgcccgcctagtgctctcaaatgtcgtcacgacgcctccccctgaaaatactcagggtgtcccacggtgggacaccctgagtatttcataccccaactcgcctcaccacacgtcgacctcgacaccgatcaagcgacccgtatcagcgacattgccgtaccgctgacccgcctggtcctctagccacgacaacgcatcccgaaacagcccgacgtcttccaaagctaaaccacagtcgtagccgcccttatcccccaaccgcaccatctggagctcccggtggcctccctcgtcgacctcgatccacagtttcgcgtgcatccgctggcctcggccctctgacaggatctcggtgagcagatcggacgcctgccctcgcgcatcctcgttactgcgggggaattggagtatgtgggaggaacgatgatgggggaggttggtgacctcatggcgcagcaggttgcgcttgtgcatctgctggtcgagacggtcgggctgacctgttgacggggttgtgccgtggcggcgtttcctcggcggggtctcgatccgttgctcttccggcggttcggcgtcaggttgtggtgcgcgatctcccctaggacgggggggctcgccacctatatccgagggacgatgagacggccttccacgcttgctgcgcactttcgcagcccgccccttgcggtcacgtcgacgcggcggcggagtgacgtcctcaccgcgcgctaactgtgttaacgcctcgaccaggttggtgcccggtttcagcccttttagcacgaaccgcaccaggcgggggtctcggccgattcgtcgggcaatctcggcttggctccacccttcggctaacagggtgcgcaacaagtcttgggcccggttatcacgctcagtcactggtcgcctcctcggggagtcctgcctgctcggcctgctctgatagagcagcccgttccgatccggtctgaggcgctttcaggggaccgggtaggacacctttgacacgcagtcgcccgtccttgccgtcatcgccgcccccctgggccacagggagcgcccaggggggcacgttgctggtgtagatggcgtcgccgtggatagccagcagggtgcgggagttcatgcgtagtgctcctcccttggttgtggcgttttttccggtggtggggtcggcgatgggtgtgttgagggtgcgtacgcgggacagggcccagat

SEQ ID NO: 206 - DNA, 12531 bp, Propionibacterium acnes
ccccaatgcccccacaacgatcagcacacccacggcgatcatcaggtgggcagcactaactgatcccaacggaccaagatcaaacaagccctgcccgggagcgccgagcagtccgtgggcgcgaagccatgctccgagattgccaatgatcttggggatcatcttgttcagtagggctatccctccgatgccgacaacgaggaagacgaggatttcttcgcctgcgttgtttcttcctgtgtttgcggtcatgctgccttctcggggtggatggccagccagctgatgaggttgtcggtgatctgccctgagatttggatcagttcgacttgcccggcctgccatgcccgcgatgtgccggccagcaatgatgctgggacccctactgcgcggccacgggatgcaacctcagccaaggcggcgcgtaactcctcgacggtgctttcgatgtaccaactgccgtcagtactagtctcagcggcatcggtggtagcgataagagcatcggtgaggtcgtcgacggcgcggtccagatcagcgatgtccggtagggctacaggagtcatggtgtgtcttccttctagggtgccttcactggtgaagggtccctagccccggccgatgtgcggttctgtgggaaaaatgcttcccattggtccgtcttagttaggaaacttggcctaagtgctgtcgagggtcgcgtgttcgtgaccggttcgaagacactgccgccttgccttcttgtcagtggcgtttccgagatggggtcagtgggcgatggctaggccgatgagggcgccgctgcacaggctgggtgcccaggggaggaatcgggtggtgtggtgtcggaaccggtcgatgagggcatatagggcgatcagggtgaggccggctatgacagtgacctggatcgtgtcgatgccggttgctgcggccggggctgcccacagtggtgtgatgcgcacgtcggagaagccgaagccgcctcgggagatgagccaggcgatcatccacgctgcgaagatgatggcggtagcgatgacagcacgtgttgccgcagtatggtccgagagggcggtaacgactacagccccgatccatccggcccatccggtccacgctaggactgccggtatccatgtggtgatggcgtcaatgacggcaacccatgccccgatggtggctagcagggcccacgtcggccacgtgggtgctggggcccatgctgtggcggtgatcatggtgagtgctgctgcgctacagaccgcgatcaagcttcggaggctgtaggtgtcgcggtaggcgatcttgtcggggctggcggtgggtggttcgggcaggatgtgggtgagggcaggccaccctgcgaccgcaatagccgcgacggcgaccacccacacaatctgttgcatgggtctcatcatggcccatcaacgatgagtatgggtggccgacatgggctcagtcgtcaagaggtgtacgggcggttgtggcttcttgggtgctgagcatgagggtgccagaatcctcgccagccgattcccagtcgacgatgacctggtcgccgtcaacgctggattcggcgatggtcacccattgcccgtccatgtcgatgagcatcccggcggccagctctgtggcggcaaccgggtgggctgggctgtagaagcggtcgatgtcgcgggcagggtcgtcgggttcttcggttacctcgggtggggtcgatctggctgtctcggtgtcgtcggccaggtcggctcccaggatgcgttcccattcggggctggttttcttgcccgctgaggccatcgtctcgtcgatctgttcgtcagtgggccacacaaatttctttttggtccaggtcgtggtgtcgggtcgcagctgatccagcagttccaggtcttgcggggagtgggccttgcgggggtcgggggtgtagaagaattggacttccttgggggctgattcgccggataggtaggtgccgcggccgcgtttgccgaacgggattcccacgccgacgtgttcggagccgaacatcatgcgggctccgtcagcggacaggggtccggtggcggcacgcccggagaagttgtctcggatttcgccgcccaggaactcggcgtcggggcgttgggtccccagatcgacgtggatacggcaggcggctgccatgcgcagcagggagccgatccagccgaaaacggggcattctccaggcatcccagagaccttgatcgttgaccaccagtttttcgcgttgccgtagaactggcggtactcgtcgatgaggaccagcacgcgggtgaagtcggtctcgcgggccccttcttcttcgatgcggcggtagcggtcctccatgagagaccacagccagtggatgagggcgacctggtcggggacggtagtggcgaccatctcgatgttgggccactcccgcaggcccaggtactcgatgcgtttagggtcgatgacgaagacgcgccagttgcggcgggcaccctcgacggcgtcgccgatcatggacaccgtttttccggtacgggtgcggccggccttgagctggtgggccatgacaccggagatgtcccagaaacaggtgttgccgtcctcgtcgacggcctgggggattttctcccagtctggggagtctgggcccggaagggccacgggtcggggcaccatcgagggcagggggtggcggcgggtgacggtgatggtgtcgtgttccaggtcgaagtcgctgcgccactggccgagcatcatcgccgaggtcaccgcggccaggcgcaattggatgttcgggctggacaaatgggcgccacgttggtggtgaatggtgaagccgtccaggttcccccgatcggttttccaggaatcgacggtgaccgccgacccatagatctgagtggctacttctttagcccgttccttgtctcggtccagatcggttttgtcagggtcaggggtcggggcgcggtattgcaggacgaaccggccggccgggatcgttgcggatgtcaccgtgaactctgccggcgaccaggcagccgcggccgcctgggtgagggccattggcatggtctcgacggcagcctcctcgggggggatggtgagggtcaggcgtcgcggatgggtcttcttgcgattccatgtgactttctgcctcaccggcaccttcgccgccgactgaatggctaggcgagctgattcggcagtttcggtacgccggccagcgcgtagcgcccgtcgtgcgtgaaggctgcccaccacagcacagcccatacacggcagccaccagcgcggatcagcggctgctgcatagcccccggtagctagtaccgcacctgaccagccggccgcgatacttttccacgccggtttcgcgccaccaggaccagcgttatggacggtctgcttcgaggctgcggagggacgagacagcggagtgctggtcatgccgcggcctccttgtggcaggtcatttcacaggcatgtcggccagcgatgatgccgtggcgcaccgccccggtagccgcatagaccgcgcacaactcaaacacggggcacccatcgcaggccgccgggtccatgctttctttgtcccacgatggtgggtcatcggtgcacggcacggccaggccgtcctgctgggcggtggcgatagcggtgaataagcgcagctgggcgcgaacttggtctggggtcaggttgacagtgcgggctacacgcatggggttccttcctcttcaccagtgaaggttccttagccccgagcgatgtgcggagagatttcagtgttttatcgaggtgaccagccatccggtctgcgctgcgggttcaggtaccagggtcagatgcaccacggtgtggtcggctaggggcacggcgaccaggggcccgtcggcgctcgccccggtgagggtgggagttccggccacggtggtggcgggaatctggttgggtttcgcggccatcagggagcccatgagggtcggggcggcgatctggacgagggcgactttgcgggcggcgggatcgcgggtcaaccagccgcgggtgaaggtgagcgcagccgacgtgatatcggggctcagcggggctggtgtggcggcggggtgggccgttgaggagggccatacgcgcggtagcgctggcgacatcgagcgggtcggagtggggtcaggtgtggggcttagggtccgatgtggcgatggggctaccgccccggtggtgggagacgagactggttgggggtggtgttgagggcgtgggatcagggtgaaggcagccaaactggccgggatgaggatgacggccgcgccgacacttcggagcgaggtcatgtgacgatccttcggtagctcgacgggttgccgtagatcttttccacgttgatgccactatgtgggttgtcggcgctgaccatttggcctccaccgatgtagacggccacgtggtgggcaggggtcccccaaaagatgaggtcgccgactttgagctggtcgtgggccacggcagtgccgactttctgctggtcggcggcggttcggggaaggctgatgccgatacgccggtacagcgccgaggtcaggcctgagcagtcgtagccgccatcagctttgccgttaccaccccacacgtaggcgtaggagttgttgtcggcgatcgatttggcccatgccacggcttcggccaggttcttcgacacaccggtctcgttagcggccccgatggcacagttgtttgacaggtgccctgtagtagtggatcccactatttgtttggccatggtttcccatttggcgtaggcatcgggcagggctgagccttgcactgcctgagctgcctgcgtcagcggcatcttctgccagtcagcgatgtcgactaaaccgggaatgtggaatccagggccgccggccgatccggggccagcgtaggtgatggtgtggcctttcaagaacgcctcggtggcgtaggcatcattgttgacctgatccagagtcccgtaccagcccggcaggatgcgctgctgaaaggggccggcgtcaccgtcaccgttagccttcgctgaggtagggtcggccccaagatctgattcttgtttggcggtcatgatagcgatgaccgctgcctgggtaggcagtttgtcacgctggaccacagtgacgatggtggtcacgagctgcttctgcctggccgtgaggcctccggcacccacagtgcctccggtgacggtacccacgcaagcatccccgccgacactgccaccgccgccgccagagttgtcgtcgagggccccagagcctactgacagcagcggcacaatgatcacggtcgctggcaagaccgccaggcccgccagcatcagcactgctgcactcaccacggcgatcacgtgagatgctttcaacgctgcccacctctcgctggtttgagggggcgacgcctgctggtacgcacaggcttggttgatccagtccgccgttgattggcaggcctgggtttgatcggcttgctgggacccggtttgggctccggagtcttaggctccggcttcacatgcctaggcacttcggctgcggtgggaggagtcagcacgtggcgtaccggcttggtgaccttctgggcacccgaaacaaccggcttagacaccaccttggcacctttgaccaccggtgcggctgccttcgcgccggccttcttgactgcacgatgcgctttgatagccccggcctcggcccggccaaccctactagcagtagcatcgagggctctgtggcccgtcgttgccctcaccggtgcatccttgccctggcgggtctgcttcgcgatcgccgacatgccgcctcgcaatgccgaaacatgattgtgggcgtgggcgatcgccgacatgccggccgtcgcgatttttgactggccctgcggggcccctgccccagcacgaatctgccggtaagccgccgacgtgccacgagcacccgccgccattcgcgccaccttcgcagccctagtcactcccgtcgacacgccacccgtggctaccgcagcagcacccgagaccacagtcgaggccatccgccttcgacccgatccggtgagcttgcgaccaccactgcgcaccatccggcgagcaccccgcccagcccactggccgatcaccgagcccctttcggaacgcttgctgcgcatccaatcgttgatcttgtccctcagccccttctcgcccttgtgacgacgccacatggacatcaagaacccgataatccccacgagctcgagcatgttgacaaccatgaccttgatggcgacatcaccgtcagaggcgaaaaccgacttgatgatgagcatgaccacacccaacatcaccatcgacccgacaatgccgatcatcgagtacaagatcgaacacagatcccggatgagcggatctgtgcggccagggatagcccgcaacacgttgagcatcgacataaacgccgaccacaccaacttgcacacgtagaaccagcacatgcccgcgaacaccagcaggaccacagccaaacccgccaccgtcgacgagtaaaagaagaaacccaccaaccacgaaccatccgcaatatcgccggcgtaatccgacaacccctcatcacagtcaccaaggtcgtcgcgagcatccgagacgtcatcgtaagggccacccttgagcacctcgatgtacttgtcgtggcacttcgcatcaataatccggccatagttgagctgctgatgaaccggcgccacgaacgagtccacaatgatcgccgacagcttcggatccttcgagtctcccgtcgaggtcatgtcatcaggaatctcgacctcaccagcggtcgccgtcgcaggatcaaccgaactagtaatcatccgagacagcgccacaccgaactgctgggtgcgagccaacggagtagccaacgtcgtcgtatcgcctgcgaacttcgccaccggggccgccaagaaacccaacgccagcgccgcagcaatcgccgcacgcgcacccgtagcccacgccccagccgtacgtcccctcatcatcttgacgaccacgcccacaccggcgcacgtcgtcagcaacgtcaacaccgttccaccccagctgtccgctcccagcggggccaaaaccttgtcgtggatgtcgttctgcaaccccaccagcgggccggtaatccacccgacccagctcatcgccacggtccagtccaacaaccggcacaacagggcaacgaccatcaggtacgtgttccaacacatgccaataatggaggcccacatactcttcagcggggccgtaacgccaccatcgtccatcgacatctggtactgaaacaagtgaataccgttggagtcagtcacattgaaaccgtcacccatccagcccagcccaggacccgacgccatggcaggcacactgctcagcgccaccaccagaaccagcgtggtgacgatgatacgaaatcgccgctccccggccccggggcggcgtggatgacggctcacgctgtctcccggtcgtgctcgggcgggttggagctggcggcttcgcggtggggaccgtaggcaggtctcagtagtcgaatttcaccgacgttgccgtgttggtcggcgtacaggccacaaccggggcctccggggttgagggcaatcttgaccaggtcagcgaactcttcaggggacgttttagggtccacgcccaggaactcgacacctttctgggcgaggttgatgttgtcgcacagcaacacgatgcgatgctgaatgaggttgcggacggtctcgttggggtaatcggcctcggggtcgtgggagccggtgataagccaggcgttggctcggcgggattcgcgcacgtactcgtcaatggcgtgggaggcttccggcgaggacgacatatggtggaactcgtcaacgatgaaagcggcgtcgcgggcccggtcgctgaagcacaccaggcgagccagacgggcaataagcgcgtagagggctcggccaaacaccttgtgcgggggcagctgccgaaacaaatgttctgacagcatctcctcggcgttaggaagagcgatgccacaagtgccaatgatgaggatgtcggcactcaggtcggcgggaggaaggtccgggtcaaagatggccgaagctagggaggccgagttctcgatgtcagcgaacacggcaatcctgtcagcgatcgcggtggcctcgggaaggtcgcactcctcggccaggtggcgggccaaacgcccacacgaggtgatctggtggtcacgcatgtaggccggtttgaggaccttggccagcgtggtcccggccacaccgatggtctccaagttaagcaaggtcagcaagaacgactgggcgacctgcccggccatctccgggggaaggatgcgcagcgggtccagcgacagcttggggtgggccgtgtcgacgatctggcgtctaaccccgtcgatagagttgacaaaggttacccactcccgctcatcggagttgtcggtggcaataatgcgcccgccccgggccgcgatggctgcgcacagccgcttctcggccatcgtcttgcccgcgcccatcttgccgatgaacgccaccgtgttgcctttctgatcctgagtgtcggcatgcaaatcgaggtaggccagcgactgcaacggggagcctgtgaccacagccaacgggatgccggtggtacggcccaaccggtactcaaccaccgggatagatgcggcgaacgcggaggcgtgagtcagctgacggtaggcgttaagcgaggaggagaaccggccaccgggccgggcagcccacagcaagtcctcctgacggcccacgggacgcacccacgtgaagtcaccgaacaccggatcattgacgaacgctcctgccagctcctcggtggtctcaaagtcaggagacgagacagtgacggtgataagagcctggatctcgacctcacgctcatcggcggccagctcggcgttgtagtcgacgagcacctgagcggaatgctcgatagacatgagggtcgaagcctgggtcatctcaccgccctcaacattgtcgagctgatcgacggtttggcggatggcccgctgatttttctgcatcgcagcgtgacgggtccgggccactccccggatcgccacgtcgaccggcacgccagtgtcgtcgatacggcccaggaactcgtaggcaggccacgtcatcgtgcggggcaccttacccagcacgatatgggactggtagacggtctcgccggtgtcggcaccgattttgaggacgcgacgattccacgcctgagccgtccgggacatgtgggagactcgcttgtcatcctcgctggccagcaggtcggaggtcgcggcctcatcgatgaccaactcccccagcgcggcacgtccaacctcatccatgagggcgattccctcgccaggggcatcatcacgcaaccgggtcgggtggcctgacaggtgctgccgaagccagatctgttcatcaacggtgaccgggcggggttggaacgctgccggcagtttcgcaccgaattccttagcctgacggagggcccactcccgtgcgacacggccaggagcggtggtcatgagtccggcggcttcggtgattttgttgagggcggcggtccaggcggtgtgggtgcgtattttctggtcttggttgagtttgatcgataggaaccacacgcgccggcctagggatgcggtttcaggctggtcgagggtggcgtcgatttcgtcggcccacacggggtgttcgctcaggtcgaggccggcggccatggcgtcgacgatttctgtggggtcggtccaggtgagggccccgttgaggcagaactcgtggcgggcgaggtggcggaataggtcgcggtgagctgcggcgacggtgagggaggcgttctcggtgacgggtcgctggaggggagtaagtcgccaagtggcccagatgtcgccggtggaggtccagacgaggttgtcgaagaggaaccgttcggggatggacatcatgactccttttcggcggcggcgaggaaggcttccaggccgctgcggcgtacagcgttcccggtagggtgcaggggttttctgggggtgggttcagatttcgaatgtgggaagagtttgtggatggtatcggtgtcctcggcgagggcttggtcgagcaggcaggtggccggggtgtcggtcatctcgtccagctcgtcgatcatctcgtcgaggaggttgggggtggtggatgcggcccacacaggtgggatagccggtgcgggtcgaggcggtgtggggaggcggagtttggtttggccccagaggggtgtgtgggtcatgccggcgggagtggtggcggcgtgagtggtcacacgccaccagcccgacagccatgccagaggtgaccaggtccagtcgatgcgaccaacaacgaactgggcgagccatccggcagccagcgcgaaaatgaaaccgcggatggtcatgcccccgtcgataattttgaagcccatcatcgcggcaggaactacgccgccgacagcgagcacctgatagatcgtgtagggcccgccaggaatccttcgacctgaggaatccttgccgataatgcggggctgctggcgggcctcggtgtgccactgaatatccacgatcagctcttgcccaatccttgcatcatctgtccgaagaattggatcgcgttaccttcgataagccagtgcgccataccacacacaaacagcatggagacgatcttggccaggctcataccgtgtttgaagatgttgaacgcggcaatgcccacgactacgaccatggcgacggctcgcaccgcggactgaccttcacctgccttgatcgtcgtccattcgaagaggttctgcgattccagtggcagcaggaggaattgatcgagcatgagaggttttcctttcaggaagccgaccgggatggtcccggtactgacgggctggacggcacgggtgtgccggccaggggcagaaggcgtgacggctggtcgagggcggcaacctcccagcggcctgcacgactgacaagagtcaggccgtactggctagtccgggtagtggattcgtcaccggtgggctggcatgtcacggtcaccgtgacggtaatcttctgccgatctgagggggtggggacctcgtcaggccccaccacatgagtggttttcaccgatacacacggggctgggtcaaccgcggtgaaagcggtccccgggctactccatctcgacaggtcagtattcccggtcagcatggcggccaagaaacccgaagaggtctgggcagccgggtcagcaggacgaatctccgaggagtccacgtcgggggctgaggccggtgcaggcatggggatctgcccaggtagacgcaaggcgatggccttgccgccggcatcgacgtggaccggaaccgaccaggcctgtccgctcccggattggccgcccatggtgaccacggtgacctgccacaggctcggatcagacggggagacggtagcgtcataggcggtgacggtggtgggcgctggaccaggtttgcggggcatgcgcgcatcggtgatcttggccgccaccaggtgttccagattgtccaagtgcccggagtcagaggtcagcagaagagtagtcacctcgaccgcggtggctgaggcgatctgagctgtgcggcggtcgtgatgggtggtgtcagtgctgacagctgtggtgggagcggatgccggggccgccgaacggaccagggcaacggggccgcatgcgactccgcacagcacgagggcaaggaagcctttggtggccatcgatccggtgtggggccagggacccacgttttcctgtgcctgttttttcttggccgaccaacggcgggacttagggttagcggatgcaccttctggggtgcatgctcgtctcaatcgcatcggtcacctccttcactggatgaagggaccaaggaggtgaccgatgtgcggtcgaacccgaaaaagttcaaacttttttctgggtctgcctcaagtacgacagaaggcctgcatcatcacggcgttgtggtagcagatcttgcgtcagcgcaaatgcatgggcctcgtaggagtagctcttaggtaggtcccggtggttgcggccagggcgagggtgtcgggtatgtgtagcgctagtcccgggttcgtggtgtgagggcttttgggtgctgacatgcactacccattgctagacgctgtgctgtggcatggctggacgtctagcagacgggttgacatcacctttaggctggcagcgcccgaggccgcaggccagaggaagcggacagcctaacgattgacgtccccctctcctttccccaacctcctggagtcgatgccccggagatagatcgatgtctatgcatcggtgcatcgatatacctatgtatctgtctgtggtttttagaggccactcccgtcgccccgggccgctcagcgataccgcaaggctgtgtgggatcag

SEQ ID NO: 207 - DNA, 12036 bp, Propionibacterium acnes
ccccaatgcccccacaacgatcagcacaccaacagcgatcatcaggtgggcagcactaactgatcccaacgaaccaagatcaaacaagccctgcccgggagcgtcgagcagtccgtgggcgcgaagccatgctccgagattgccaatgatcttggggatcatcttgttcagtagggctatccctccgatgccgacaacgaggaagacgaggatttcttcgcctgcgttgtttcttcctgtgtttgcggtcatgctgccttctcggggtggatggccagccagctgatgaggttgtcggtgatctgccctgagatttggatcagttcgacttgcccggcctgccatgcccgcgatgtgccggccagcaatgatgctgggacccctactgcgcggccacgggatgcaacctcagccaaggcggcgcgtaactcctcgacggtgctttcgatgtaccaactgccgtcagtactagtctcagcggcatcggtggtagcgataagagcatcggtgaggtcgtcgacggcgcggtccagatcagcgatgtccggtagggctacagcagtcatggtgtgtcttccttctagggtgccttcactggtgaagggtccctagccccggccgatgtgcggtgctgtgggaaaaatgcttcccattggtccgtcttagttaggaaacttggcctaagtgctgtcgagggtcgcgtgttcgtgaccggttcgaagacactgccgctttgccttcttgtcagtggcgtttccgagatggggtcagtgggcgatggctaggccgatgagggcgccgctgcacaggctgggtgcccaggggaggaatcgggtggtgtggtgtcggaaccggtcgattagggcatatagggcgatcagggtgaggccggctatgaccgtggcgtggatcgtgtcgatgccggttgctgcggccggggctgcccacagtggtgtgatgcgcacgtcggagaagccgaagccgcctcgggagatgagccaggcgatcatccacgctgcgaagatgatggcggtagcgatgacagcacgtatcgccgcagtatggtccgagagggcggtaacgactacagccccgatccatccggcccatccggtccacgctaggactgccggtatccatgtggtgatggcgtcaatgacggcaacccatgccccgatggtggctagcagggcccacgtcggccacgtgggtgctggggcccatgctgtggcggcgatcatggtgaccgcagccgcggcacagaccgcgatcaagcttcggagactgtaggtgtcgcggtaggcgatcttgtcgggattggcggtggccggttcgggcaggatgcgagtgagggagggccatcctgcggtcgcaatagccgcgacggcgaccacccacacgatctgttgcatgggtctcatcatggcccatcatcgatgagtatgggtggccgacatggggtcactcgtagaggggatcgaggggtgtgcgggcgagcatggcttcctgtgtgccgagcatgagggtgccagagtcgtcgccggccgattcccagtcgacgatgatctgcccgctgtcgacgctggattcggtgatggtcacccattctccgtcgatattgatgagcaccccagcggccagctctgtggcagcaaccgggtgaggtgggttgtagaagcggtcgatgtcgcaggcagggtcgtcgggttcctcgactaccggaggtggggtagggctgagctgttcggtgtcgtcggccaggtcggctcccaggatgcgctcccattcggggctggttttcttgcccgctgaggccatcgtctcgtcgatctgttcgtcagtgggccacacaaatttctttttggtccaggtcgtggtgtcgggtcgcagctgatccagcagttccaggtcttgcggggagtgggccttgcgggggtcgggggtgtagaagaattggacttccttgggggctgattcgccggataggtaggtgcctcggccgcgtttgccgaacgggatgcccacgccgacgtgttcggagccgaacatcatgcgggctccgtcagcggacaggggtccggtggcggcacgcccggagaagttgtctcggatttcgccgcccaggaactcggcgtcggggcgttgggtccccagatcgacgtggatacggcaggcggctgccatgcgcagcagggagccgatccagccgaaaacggggcattctccgggcatcccagagaccttgatcgttgaccaccagtttttcgcgttgccgtagaactggcggtactcgtcgatgaggaccagcacgcgggtgaagtcggtctcgcgggccccttcttcttcgatgcggcggtagcggtcctccatgagagaccacagccagtggatgagggcgacctggtcggggacggtagtggcgaccatctcgatgttgggccactcccgcaggcccaggtactcgatgcgtttagggtcgatgacgaagacgcgccagttgcggcgggcaccctcgacggcgtcgccgatcatggacaccgtttttccggtacgggtgcggccggccttgagctggtgggccatgacaccggagatgtcccagaaacaggtgttgccgtcctcgtcgacggcctgggggattttctcccagtctggggagtctgggcccggaagggccacgggtcggggcaccatcgagggcagggggtggcggcgggtgacggtgatggtgtcgtgttccaggtcgaagtcgctgcgccactggccgagcatcatcgccgaggtcaccgcggccaggcgcaattggatgttcgggctggacaaatgggcgccacgttggtggtgaatggtgaagccgtccaggttcccccgatcggttttccaggaatcgacggtgaccgccgacccatagatctgagtggctacttctttagcccgttccttgtctcggtccagatcggttttgtcagggtcaggggtcggggcgcggtattgcaggacgaaccggccggccgggatcgttgcggatgtcaccgtgaactctgccggcgaccaggcagccgcggccgcctgggtgagggccattggcatggtctcgacggcagcctcctcgggggggatggtgagggtcaggcgtcgcggatgcgtcttcttgcgattccatgtgactttctgcctcaccggcaccttcgccgccgactgaatggctaggcgagctgattcggcagtttcggtacgccggccagcgcgtagcgcccgtcgtgcgtgaaggctgcccaccacagcacagcccatacacggcagccaccagcgcggatcagcggctgctgcatagcccccggtagctagtaccgcacctgaccagccggccgcgatacttttccacgccggtttcgcgccaccaggaccagcgttatggacggtctgcttcgaggctgcggagggacgagacagcggagtgctggtcatgccgcggcctccttgtggcaggtcatttcacaggcatgccggccagcgatgatgccgtggcgcaccgccccggtagccgcatagaccgcgcacaactcaaacacggggcacccatcgcaggccgccgggttcatgctttctttgtcccacgatggtgggtcatcggtgcacggcacggccaggccatcctgttgagcggcgctgatagcggtgaataggcgcagctgggcgcgaacttggtctggggtcaggttgacggtgcgggctacacgcatggggttccttcctcttcaccagtgaaggttccctagacccggccgatgtgcggagggatttcagtgttttatcgaggtgaccagccagccggtctgcgctgcgggttcaggtaccagggtcagatgcagcatggtgtggtcggctaggggcacggcgaccaggggcccgtcggcgctcgccccggtgagggtgggagttccggccacggtggtggcgggaatctggttgggtttcgcggccatcagggagcccatgagggtcggggcggcgatctggacgagggcgactttgcgggcggcgggatcgcgggtcaaccagccgcgggtgaaggtgagcgcagccgacgtgatatcggggctcagcggggctggtgtggcggcggggtgggccgttgaggagggccatacgcgcggtagcgctggcgacatcgagcgggtcggagtggagtcaggtgtggggcttagggtccgatgtggcgatggggctaccgccccggtggtgggagacgagactggttgggggtggtgttgagggcgtgggatcagggtgaaggcagccaaactggccgggatgaggatgacggccgcgccgacacttcggagcgaggtcatgtgacgatccttcggtagctcgacgggttgccgtagatcttttccacgttgatgccactatgtgggttgtcggcgctaaccatttggcctccaccgatgtagacggccacgtggtgggcagggcttccccagaggatgaggtcgccgactttgagctggtcacgggccaccgcggtgccgactttctgctggtcggcggcggtgcggggaaggctaatgccgatacgccggtacagcgccgaggtcaggcctgagcagtcgtagccgccatcggctttgccgttgccaccccacacgtaggcgtaggagttgttgtcagcgatcgatttggcccatgccacggcttcggccaggttcttcgacacaccggtctcgttagcggccccggtggcacagttgtttgacaggtgccctgtagtagtggatcccactatttgtttggccatggtttcccatttggcgtaggcatcgggcagggctgagccttgcactgcctgagctgcctgcgtcagcggcatcttctgccagtcagcgatgtcgactaaaccgggaatgtggaatccagggccgccggccgatccggggccagcgtaggtgatggtgtggcctttcaagaacgcctcggtggcgtaggcatcattgttgacctgatccagagtcccgtaccagcccggcaggatgcgctgctgaaaggggccggcgtcaccgtcaccgttagccttcgctgaggtagggtcggccccaagatctgattcttgtttggcggtcatgatagcgatgaccgctgcctgggtaggcagtttgtcacgctggaccacagtgacgatggtggtcacgagctgcttctgcctggccgtgaggcctccggcacccacagtgcctccggtgacggtacccacgcaagcatccccgccgacactgccaccgccgccgccagagttgtcgtcgagggccccagagcctactgacagcagcggcacaatgatcacggtcgctggcaagaccgccaggcccgccagcatcagcactgctgcactcaccacggcgatcacgtgagatgctttcaacgctgcccacctctcgctggtttgagggggcgacgcctgctggtacgcacaggcttggttggtccagtccgccgttggttggcaggcctgggtttgatcggcttgctgggacccggtttgggctccggagtcttaggctccggcttcacatgcctaggcacttcggctgcggtgggaggagtcagcacgtggcgtactggcttggtgaccttctgggcacccgaaacaaccggcttagacaccaccttggcacctttgaccaccggtgcggctgccttcgcgccggccttcttgactgcacgatgcgctttgatagccccggcctcggcccggccaaccctgctagcagtagcatcgagggctctgtggcccgtcgttgccctcaccggtgcatccttgccctggcgggtctgcttagcgatcgccgacatgccgcctcgcaatgccgaaacatgattgtgggcgtgggcgatcgccgacatgccggccgtcgcgatttttgactggccctgcggggcccctgccccagcacgaatctgctggtaagccgccgacgtgccacgagcacccgccgccattcgcgccaccttcgcagccctagtcactcccgtcgacacgccacccgtggctaccgcagcagcacccgagaccacagtcgaggccatccgccttcgacccaatccggtgagcttgcgaccaccgctgcgcaccatccggcgagcaccccgcccagccaactggccgatcaccgagcccctttcggaacgcttgctgcgcatccaatcgttgatcttgtccctcagccccttctcgcccttgtgacgacgccacatggatatcaagaacccgataatccccacgagctcgagcatgttgacaaccatgaccttgatggcgacatcaccgtcagaggcgaaaaccgacttgatgatgagcatgaccacacccaacatcaccatcgacccgacaatgccgatcatcgagtacaagatcgaacacagatcccggatgagcggatctgtgcggccagggatagcccgcaacacgttgagcatcgacatgaacgccgaccacaccaacttgcacacgtagaaccagcacatgcccgcgaacaccagcaggaccacagccaaacccgccaccgtcgacgagtaaaagaagaaacccaccaaccacgaaccatccgcaatatcgccggcgtaatccgacagcccctcatcacagtcaccaaggtcgtcgcgagcatccgagacgtcatcgtaagggccacccttgagcacctcgatgtacttgtcgtggcacttcgcatcaataatccggccatagttgagctgctgatgaaccggcgccacgaacgagtccacaatgatcgccgacagcttcggatccttcgagtctcccgtcgaggtcatgtcatcaggaatctcgacctcaccagcggtcgccgtcgcaggatcaaccgaactggtaatcatccgagacagcgccacaccgaactgctgggtgcgagccagcggagtagccaacgtcgtcgtatcgcctgcgaacttcgccaccggggccgccaagaaacccaacgccagcgccgcagcaatcgccgcacgcgcacccgtagcccacgcccctgccgtacgtcccctcatcatcttgacgaccacgcccacaccggcgcacgtcgtcagcaacgtcagcaccgttccaccccagctgtccgctcccagcggggccaaaaccttgtcgtggatgtcgttctgtaaccccaccagcgggccggtaatccacccgacccagctcatcgccacggtccagtccaacaaccggcacagcaacgcaatgaccatcaggtacgtgttccaacacatgccaataatggaggcccacacacccttcagcggggccgtaacgccaccatcgtccatcgacatctggtactgaaacaagtgaataccgttggagtcagtcacattgaaaccgtcacccatccagcccagccccgggcccgacgccatagcaggcacactgctcagcgccaccaccaaaaccagcgtggtgacgatgatacgaaatcgccgctccccggccccggggcggcgtggatgacggctcacgctgtctcctggtcgtgctcgggcgggttggagctggcggcttcgcggtggggagcgtaggcaggtctcagtagtcgaatttcaccgacgttgccgtgctggtcggcgtacaggccacaaccgggacctccggggttgagggcaatcttgaccaggtcagcgaactcttcaggggacgtcttgggatctacgcccaggaactcaacgcccttttgggcgaggttgatgttgtcgcacagcaacacgatgcgatgctgaatgaggttgcggacggtctcgttggggtaatcggcctcggggtcgtgggagccggtgataagccaggcattggctcggcgggattcgcgcacgtactcgtcaatggcgtgggaggcttccggcgaggacgacatgtgatgaaactcgtcaacaatgaaagcggcgtcgcgggcccggtcgctgaagcacaccaggcgagccagacgggcaataagcgcgtagagggctcggccaaacaccttgtgcgggggcagctgccgaaacaaatgttctgacagcatctcctcggcgttaggaagagcgatgccacaagtgccaatgatgaggatgtcggcactcaggtcggcgggaggaaggtccgggtcaaagatggccgaagctagggaggccgagttctcgatgtcagcgaacacggcaatcctgtcagcgatcgcggtggcctcgggaaggtcgcactcctcggccaggtggcgggccaaacgcccacacgaggtgatctggtggtcacgcatgtaggccggtttgaggaccttggccagcgtggtcccggccacaccgatggtctccaagttaagcaaggtcagcaagaacgactgggcgacctgcccggccatctccgggggaaggatgcgcagcgggtccagcgacagcttggggtgggccgtgtcgacgatctggcgtctaaccccgtcgatagagttgacaaaggttacccactcccgctcatcggagttgtcggtggcaataatgcgcccgccccgggccgcgatggctgcgcacagccgcttctcggccatcgtcttgcccgcgcccatcttgccgatgaacgccaccgtgttgcctttctgatcctgagtgtcggcatgcaaatcgaggtaggccagcgactgcaacggggagcctgtgaccacagccaacgggatgccggtggtacggcccaaccggtactcaaccaccgggatagatgcggcgaacgcggaggcgtgagtcagctgacggtaggcgttaagtgaggaggagaaccggccaccgggccgggcagcccacagcaagtcctcctgacggcccacgggacgcacccacgtgaagtcaccgaacaccggatcattgacgaacgctcctgccagctcctcggtggtctcaaagtcaggagacgagacagtgacggtgataagagcctggatctcgacctcacgctcatcggcggccagctcggcgttgtagtcgacgagcacctgagcggaatgctcgatagacatgagggtcgatgcctgggtcatctcaccgccctcgacgttgtcgagctggtcgacggtttggcggatggcccgctgatttttctgcatcgcagcgtgacgggtccgggccactccccggatcgccacgtcgaccggcacgccagtgtcgtcgatacggcccaggaactcgtaggcaggccacgtcatcgtgcggggcaccttacccagcacgatatgggactggtagacggtctcgccggtgtcggcaccgattttgaggacgcgacgattccacgcctgagccgtccgggacatgtgggagactcgcttgtcatcctcgctggccagcaggtcggaggtcgcggcctcatcgatgaccaactcccccagcgcggcacgtccaacctcatccatgagggcgattccctcgccaggggcatcatcacgcaaccgggtcgggtggcctgacaggtgctgccgaagccagatctgttcatcaacggtgaccgggcggggttggaacgctgccggcagtttcgcaccgaattccttagcctgacggagggcccactcccgtgcgacacggccaggagcggtggtcatgagtccggcggcttcggtgattttgttgagggcagcggtccaggcggtgtgggtgcgtattttctggtcttggttgagtttgatcgataggaaccacacgcgccggcctagggattcggtttcaggctggtcgagggtggcgtcgatttcgtcggcccacacggggtgttcgctcaggtcgaggccggcggccatggcgtcgacgatttctgtggggtcggtccaggtgagggctccgttgaggcagaactcgtggcgggcgaggtggcggaataggtcgcggtgagctgcggcgacggtgagggaggcgttctcggtgacgggtcgctggaggggagtgagtcgccaagtggcccagatgtcgccggtggaggtccagacgaggttgtcgaagaggaaccgttcggggatggacatcatgactccttttcggcggcggcgaggaaggcttccaggccgctgcggcgtacagcgttcccggtagggtgcaggggttttctgggggtgggttcaggtttcgggtctaggaggggtttgggctcgtaggtggtgtcgatgtcttcggcgagggcttggtcgagcaggcaggtggccggggtgtcggtagtctcgtccagctcgtcgatcatctcgtcgaggaggttgggggtggtggatgcggcccacacaggtgggatagccggtgcgggtcgaggcggtgtggggaggcggagtttggtttggccccagaggggtgtgtgggtcatgccggcgggagtggtggcggcgtgagtggtcacgcgccaccagcccgccagccatgccagaggtgaccaggtccagtcgatgcggccgatgatgaactgggcgagccatccggcagccagcgcgaaaatgaaaccgcggatggtcatgcccccgtcgataattttgaagcccatcatcgcggcaggaactacgccgccgacagcgagcacctgatagatcgtgtagggcccgccaggaatccttcgacctgaggaatccttaccgataatgcggggctgctggcgggcctcggtgtgccactgaatatccacgatcagctcttgcccaatccttgcatcatctgtccgaagaattggatcgcgttaccttcgataagccagtgcgccataccacacacaaacagcatggagacgatcttggccaggctcataccgtgtttgaagatgttgaacgcggcaatgcccacgactacgaccatggcgacggctcgcaccgcggactgaccttcacctgccttgatcgtcgtccattcgaagaggttctgcgattccagtggcagcaggaggaattgatcgagcatgagaggttttcctttcaggaagccgaccgggatggtcccggtactgacgggctggacggcacgggtgtgccgtccggaggcagaaggcgtgacggctggtcgagggaggcaacctcccagcggcctgcacgactgacaagagtcaggccgtactggctggtccgggtggtggattcgtcgccggtgggctggcatgtcacggtcgcggtgacagcgatcttctgccggtctgagggggtggggatctcgtcaggccccaccacatgagtggttttcactgatacgcatggggctgggtcaaccgcggtgaaagcggtccctgggctactccatctcgacaggtcgtcgctgccactcagcatggcggttaggaagcctgaagaggcttgggcggccgggtcggcggtgcgaagctccgaggtgtctagggtgggggctgaggccggtgcaggcatggggatctgtccaggtagacgcaaggcgatggccttgccgttggaatcgacgtggaccgggactgaccaggcctgtccggtcccggattggccgcccatggtgatcactgtgacctgccacaggctcggatcagacggggagacggtagcgtcataggcggtgacggtggtgggcgctggaccaggtttgcggggcatgcgcgcatcggtgatcttggccgccaccaggtgctccagattgtccaagtgcccggagtcagaggtcagcagaagagtagtcacctcgaccgcggtggctgaggcgatctgagctgtgcggcggtcgtgatgggtggtgtcagtgctgacagctgtggtgggagcggatgccggggccgccgaacggaccagggcaacggggccgcatgcgactccgcacaacacgagggcaaggaagcctttggtggccatcgatccggtgtggggccagggacccacgttttcctgtgcctgttttttcttggccgaccaacggcggggcttgggctcagcggatgcactttctgagttacgtactcgtcccaatcgcatcggtcacctccttcactggatgaagggaccaaggaggtgaccgatgtgcggtcga

SEQ ID NO: 208 - DNA, 9744 bp, Propionibacterium acnes
gctgacatgcaccgcccattgctagacgctgtgctgtggcatggctggacgtctagcagacgggttgacatcacctttaggctggcagcgcccgaggccgcaggccagaggaagcggacagcctaacgattgacgtccccctctcctttccccaacctcctggagtcgatgacccggagatagatcgatgtctatgcatcggtgcatcgatatacctatgtatctgtctgtggtttttagaggccactcccgtcgccccgggccgctcagcgataccgcaaggctgtgtgggatcagctgcgccgctcccccgacatggcagacagcaccctgcggactgactgacactgtggcgccgcggaggtctcccgcggcgtccgctggggcgagtgcatgcctgtcagctcatcttttatcgtcatgtttccccttgtcagagcgggctttgcaaagtgacaacgttggggggcttgacgacaacgtcctcgacaaccccgaggcggtgatctgtgtcttgtcagatcaaccgcaacgggaaagaggcaccgctgatgttcgccaccacagctaccctcaacgatgaatgggaccagattcgcgccactgagatcgattggcatgactgccccgaactgatgcactgcgtcaccgccgaggatgtgctggccgtcatcccggccgcccccgacgccatcttgggctacctcattacccgagctcaggacggtgacgaattagccacccgcaccatcatccaagcgttcacaggcaagcttattttgatggccacggccaccaaggtgcgccgtactaatgacggcttcaatgatctgctggcggggttgtgggagacgatcatcacgtacccgttggatcgtcgccctgacaagatcgctgcgaacctcaccctcgacacgttgcaccgggttacccggttctggcgtgctgattcccccgatgaggaagacgctcacggtctggtgcccttccctgacactctcatcgccccagagcccgatgaggacgtcacagctagccaggccatcgccttggcggtggaccgcaactggattaccgaggacctagcccgcctcatgagccatatttactgtgacggtatgactggagctgatgcgggtcgtctgcatggctgcgctccagctacggtgcgatctcgatgccgtgatggtcgggccgtgttgcagcgcaacgccgagacgatcctggccgtctgctgatccctctcttgctcatgcctgccgccaccctacccctacctgctagaaacatagccatgtctccagcaacgcatctagcgtatcttctagcaattgatctagctatgtatatagctgatgatctagctatcatatagctgtgtctccagcccaaatgacagcccaatggcatgcttgccacaggaaggtgcgtcagcctcccgaaatactggaaggagctttagcgtgcaggacatgaccagtcctattgaccgatccccgttcgaccgcactattgcggtgtggaaccacaaaggcggcacgttcaagacgtccgtcgtggcgaacctgggatacctgttcgccgccggtggcaacaaggtgttgatggtcgacatggacccccaggccaatctcgacatcgacttcggtatacccgcaggagaacgtgaacggggcatgggattagccgaggcgctacgtgaggggactgtccttcccccaccacagcatctcagcgaaaacctccacctggtcagtggcggcgctgctctcaacgagttcaccgaccccgcatccttagcggccatcatcgaccgagtcaccaccgagcgctacgacctgctagctcaggcccttgccccgctggcctgggactatgacctcatcttcatcgactccgggcctgcccaaactctgctgtcccagaccatccttggagtagcccgctggctggtagtgcccacccgcaccgataacgcctcaatcactggcctcgtcgacgttcaagacgccatcgacggggttgcctcctgcaaccctgaccttcaactactcggcgttgtcctagccggcgtgggggcccgggccacccggatcgccgcagataaacgccacgccatcgacacagtgctgggggcaggaaccgttttcgatgcggtcatccactactccgagaaggtgtccgtgctcgcacgccagcagggcaagaccgtcgccgagctagccaacgagtaccacaacacccagcccgcctacacctacctagctaaaggccagaacatccccaacgtcgccaaggcagccgtcagcatcgaaactgattatctgaggctggccaccgagatcagcgaccgcatgttcaccagcgacgagcaggagcctgatcatgactgacgatccgactccatccgagcagaacaaccccaccagcgacgacatgcgcttggccgaagaatgggccaacagcggccgcacagtgggagccctgccgcgccgtcaacggcctcagcgacccacaccccgcaccaccagccaaccccctgtctcgtcccctgacacaccggctccgaaaaaagcccagaagacccccaccagccagcctggccgtcaacggatcaacgtcaccgtctacgttgtgcccgaactccatgagcggctgcgctcccgatcggcggcgacgggggtgacggtctcggatctggtggtgcatgcgttagcgttcgtcgccgatcatgcgggggaggcgatcgccgatgatctgcgcgtcgagacgggccccggcatgggggccggactgttcgatgtgaccccatcgcggccagtaggggtcgccaaaacccagctgggggtgcgaatgacccgccacaacaagaatggcttggaccagctgacccggacgagtggggcccgtgaccgcagccatcttgtgtctgtcgccgtgcgcgactatctcgactccaaccctgtaaagaaaggccgacatgtccgctgatgaaactcctgccgcccggggtgggcgacgctttgatacgaccgtcaagcccaggcgccgtcccatgcttatcgccgccggtatcgccatcgtgatagtcggcgcgctcctcatcactcagttgattcgctccgcccaaaccgagcatcgcgtgctggaagtccacgccgatgtggctcgcggcgaggtcatccgtgacaccgatctggtatcggtgactgtcggccaggtcgacaacgtatcaacggttcccgcagaccagctcgactcactggtcggcaaacgcgccacggcagatcttcgagccggatcactcttgcctgctggggctatcggcccggccgatgtcgttccagctccgggcaagtcgctggtcgggctgaagctagccgccggacagatccctatcggagaccttgctgccgggacgaagctgcgcctgatccagacgtcggcacccagcggctcatccaccaccactgatagcagcaccaataccgatggccagtcgtgggaggcaacaatggcgaccggcaccaaaaagaccgagcaggtcaccttgatcaacgccgaagtgaactcgcgtgatgccgcccggatcgcccaactgacgtcacagggccgtatcgccgtagtgaaggatccgatccgatgagcaccattgttttgaccagcgtctcgggagccccaggggtcaccacgacagcgatcgggctgggcagggtctggccacaatcgagcctggtcatcgaggatgacacccaccacgccatgctggcgggctacctgcgagcctcccagcacgccgaaccgaacctggccgcagtggcgaacctgacgtcgactccaaccaacgcccaaacggtgtgggaatctatcgccagacccctacccaccgatgacccagtcggcgggctgcgacgcaaaggcatcctcggcccgcccacgccgtggtctcgcgcaggcatcgacccccgatggggattcatgctggccctgtggcggcaactggaggaggctggcatcgacaccatcatcgatttgggtcgcctagccacaccactgacctcaacgccacacctgatcgccgcacccatcgtcgaggacgccgacatgatcttggtgatgatcgaggcgacactacgcgacatcgccggcgcccgcacgatggtggagggactcgctgagcagatgaacttggccggcgcctaccgacgtctcggactgcttgtccaccgtggcggccaggcccgcggcgtcgccgagttcaatgacaaggagatcacctcggcgttacgactcccggtcatcggggccattacccatgacccggccggagccgcccaactctccgacggggtcgggcagcggttcgacaagtcacgtctggcccgctcactatcaaaggtggcggccagcctcgtcgatgccataaacaagcgccacgctgatgacgaggaggatctgtgatggccagttttgctgataatccgttcgacaagctgcgctcccaggatgcggcaagagcttcggtagagcaggagcctgatgccggattagcgtcggagttgttttcggcgtcgtcggggtgggccagctctcagcaggtgtcccaagctcaaccggtgatgacccgttcggagaacgtggattggccggttgtcgcggagctagccagtacggccactgatgaggttgaggctgagatcagccggtggagttccactcatgatggggtggcgacgctagacattcgccaggccatcgcggagcctgctattgcctcggcggtgtctacgtatgctgaccgacgccagatcgatgtaggggagacctggcctgatctggtacgccagcgataccgcaaggctgtgtgggatcagctgttcgggatggggcggttgcagccgctgttcgaaatcagcgacgccgaaaacatcatcgtggtgggtaaccatgaggtggttgtcgaccacaacgatggttcccggtcaacgctgccgccggtggccgactcggatgccgagctggaatcccagatcgcccggatggcgaggaatgcgaccccgcggcgagccttcgacgccgatcacaccgatgtgacgatcatgcaccaacagaagttccgtatccacgcgatctcagcggaagtgtcattgcaaccgtcggtggtcatccgccaacatttgctcacccaaatcagtctgggggatctgtcacatcgcggaatgatgccggtggaagtggcccggttcctcgatgaggcggtacaagctggcaagtccatcgtggtcgccggtgagcagggtgcaggcaagacgacgtttttacgagcgttgatccacgccattccgatgcgggagcggttcgccacgctggagaccgatcaggagttgttcgctcatctgatgcctggccgggaaaacacgctggtgctgttcgcccgtgatggtaacggcgaggtggatccggcgactggcacccagcacggcgctatcgagatcgcccagctgattcctcctagcctgcgccaggcgttaactagggtcattgtcggtgaggtgcgcggcaatgaggcctcggccatgttccaggccatgcagtcgggtacaggcaccatgagcagtatccactccccgcgagcctctgaggtgccgtcccggctagcccaaatgatttcgatgggcccggtctacgatctggatcaggccatgctgcagatcggtcattcgatcgactacatcgtctttgttcgtaagcgtgacctgcctgatgggagccggctgcgatttgttgagcagatccgttcagtctcgcctggtgattcgacaactcccagtcttggcgaggtgtacacggccgatgcgtggaccggtcagccgttgaccccgctcatgcctggttcggccgccgacgagctgtctcacttcgcccgagacctggattactgcgaggcccactcatgaacactcccgcactaaccagcgccctcatcatggccgggctagggctgatcctggccatcgacgggctggtcccggcgccgcctcgacctggggccccgctgagcccggcccagaggtgggccaggctcacccaccgtcccacaggagcggccgggcgccgccgggatttgcgttgggggttggctgttctcgtcggcgtcgtgctgtttgtgctcaccgggtgggtggctgcgctggcgttgggccccatcattgtgttgttggcccccaccctgctgggggcggccccaccgaccgatattccgctgatggaggcgttggatcggtgggtgcgtcaggtcgctgcggtgctgccacaggggcgagacatcatcacagcggtgcggatctcacggccgcgggccccgaagctgatcgccgggtcggtggatcaactggtgtcccggttggatggccgtatggagccgagggaggcgttccagcggatggccgacgagctggactcggctgaggctgacgcggtgctggcctcactagcgttggcggccactcacccgcggggagcctcgacaacgttgaaagctattgctggcaacatccaacagcggttgaaagtgctgcggcaggtggaggctgagcggtctaagccgcgtaactcggtgcgccagatcacactggtcacgatcgccatgttcggggggctgctcgtgatcggacggtcgtttctggccccgctggcgacccctcccggtcaggtgctggtggccgtggcggtggtcatgtatgtcatcgcactagtgcagatgtatcggatggcgcggccccgtcgacgcacccggatcatggttaggaggacccgatgaccattactgctttgtccctgctggtcggggccatcgtcactgtcggactgctggtcatcgtggcagcgttccgcccagccccaggccctgacctgtttgccgctctggaggtggtgtcgggtcgcacctcaagcgtcgccgagaacgtcgaccagacccggatcgggcggataggtcgcagcgtgacccgcacattccatgtgtcggtgtccccggccatgcgggccgcactgcgactccaaggcacgacccccgaagcgttctacggtcgacgcctgatctgcgcactgatcggggcgatcctgccgtggctgctcaacgcggtagccatcgcggtaggggcgaattccccgaacctactcatcccttcggcgctgtgtgtggcgttagctggcgctggatggatgctgccggcagcacggttgaaggctgcggccgggcccaccaacgatgactcgttcgaagcgctgctggtattcatcgatttggtcgtgctggaacggctcgccaacgaaacctccgtcgacgcgctcaccaatgcggcaaacatgtcggactcgccgctattcgtccagatccgtcaagtcctcaaccgtgcctccctggaaaacgtcgacccgtggaacgggctagaccggctagccgaggacatcaaactgcccgaactcaccgatgtggtctccatcgcccgcctccaaaacgaaggcgcctccctcgtcgacagtttccgggcccgagtcgccgagttgcgcgacgcctacctgctgcgcctgcaacaagaatccaccacgatcacccagcggcttggcctgtggacgatcctgcaagccggctcggtcatgctcatcttgctgggggcggccgccctcacactaatcacagccggataaaacgacaccgtgtcgagcccccatatgggccgcgaacctttcataatgatgcctgtaagcaccacaatattgatcacaacctaacaatgaaggagaaatcatgatgaccgatctcgacctggctaaaaaacagatcacctggctggcggcgcacctgcgttcccggatcgttgacgagcgtggcggtggtagctctaccgtggagacactgatttggattggtgtcatcgtggcgctggtgattggtgtgggcgtcggggtgacggcctatatcaggtcgaagatgcctcactgacgacgatgcgtagcaggttcacaactgatcagcgtggcggtggtagcgcgtcggtggggatgctcctgctgatgcctgcgatcatgctgctggcattcggtgggatcgaggtcgggatgtggtgtcacgcccatcagtcgaccatcgcggcagcccaaagcgccgcggaagctcagcgtgtcgtccatccggtcccggggtcggcacaggaggcagcctcgcagatcactagtcatggcggggtgcgtgatacccggatatcggtcagtgatgacggggccactgtcacggtgaccgtggtgggccgggccccatcgatgctggggctgcatcttcctgctgtgtcgtcgacagcgtcgatgcccaaggagcgcctgtcgtgaggcgaagtgagcgcggtggagcaagtctaagcgtcgaggtgctcatgtgggcgccgatcgcgctggtgatcatcgggtttgttgtgggtatcggccggatgtcgatggcccaggacgcggtgagtggcgcggcgggtgctgcggcccgtgcggcgtcgttggagcgtgatggacagtcggctcagtctgcggcgcagcaggcggcgtcggcgaacctgtcgtccggtgggctggcatgtgcgccgagtgtgagcgtggacacgtcagtgtttgcccgtcctgccgggcaggcgggcacggttcacgccacggtcacgtgtgtcacctcgctgggtcttgggttcgggtcccggacggtgcacgcaacggggtctgccccggtagacacctatcgggaaaggagaggctgagatggcccgtgatgagcgtggtggcggctcggtgtcggtgtggatgctgctcatggtgccggtgattctggtcatggccggcctggtttttgacgggtcccgtcagatatcggcaacccaggcggcccaggacgcggcggttgcggcatcccgcgccggaactgatgcggcagcgacaccgcagcttgctggccacgacggggcggccgtagcagtccaagcggcccgccaggcactatctgctgccggggtggacgggtcggtgcaggaggacgggtcgaccatcacggtgaccacgtctcaaagtcggccgacagtgttcctgtcagcgatcggaatcagccaggtaagggggcatgggcaggcccatgctcagcttgtgggaccgggagaacgcccatgacagtgatacgtcgtatcggtgccctggtggcactgctggtggtgatagccggcttaccggccgggctcgtggccgcaggcgccccgctagtaccctcgggcctgtcatgggcccatgtgcggcatctgttggttaccccagacatgaccgggtcggtgctggtgtggctggtcagcctcatcggctggatcgggtgggcatggttcgccctggccgtcgcagccgaagcggtgacgatgctctcagggcagcggctgcactggcacatgcccggccctcgcctagtgcgccgagtggcagccggtcttctcattgccgcgttcgcggccgcaccggcagccacaagcacggctcacgccgccgaggccacccatgtggcggtcgccgcccaggctggaccggcacacgcggccggcacccaggacagccccgccaccacctctcaggccccggacgcctccaccactccgaaaatctggaagacctacacggtgcgggccaacgactacctgtggaagatcgccgagcactactacggtgacg

SEQ ID NO: 209 - DNA, 1127 bp, Propionibacterium acnes
accccaactcgcctcaccacacgtcgacctcgacaccgatcaagcgacccgtatcagcgacattgccgtaccgctgacccgcctggtcctctagccacgacaacgcatcccggaacatccgcacgtcttccaaagcgaaaccgcagtcgtagccgcccttgtcccccaaccgcacaatctggcgctcccggtggcctccctcgtcgacttcgatccatagtttcgcgtgcatccgctggccgcggccttctgacaggatctcggtgagcagatcggaggcttgtcctcgcgcatcctcgttgtcgcgagggaattggagtgtgtgggaggaacgacgatgggggaggttggtgacctcgtgacgcagcaggttgcgcttgtgcatctgccgttcgagacgctcgggctgacctgttgacggggttgagccgtggcgccgcttcctcggcggggtctcgatccgttgctcttccggcggttcggcgtcaggttgtggtgcgcgatctcccctaagacgggggggctcgccacctatatccgagggacgatgagacggccttccacgcttgctgcgcactttcgcagcccgccccttgcggtcacatcgacgcggcggcggagtgacgtcctcaccgcgcgctagctgcgtcaacgccgacaccaggttggtgcccggtttcagcccttttagcacgaaccgcaccaggcgggggtctcggccgattcgtcgggcaatctcggcttggctccacccttcggctaacagggtgcgcaacaagtcttgggctcggttatcacgctcagtcactggtcgcctcctcggggagtcctgcctgctcggcctgctctgatagagcagcccgttccgatccggtctggggcgcttccaaagggcccggcaagacacctttgacacgcagccgcccgtccttgccgtcatcgccgcccccctgggccacagggagcgcccaggggggcacgttgctggtgtagatggcgtcgccgtggatagccagcacggtgcgggagttcatgcgtagtgctcctcccttggttgtggcgttttttccggtggtggggtcggcgatgggtgtgttgagggtgcgtacgcgggacagggcccagat

SEQ ID NO: 210 - DNA, 718 bp, Propionibacterium acnes
ccggggccctgctgctggtgtgggacgtcaccgttttgaccgggcccactctcggccaccgcgtgcgtcctctcagtaaggacgccgagctgactgcccggcgctggctcgaccaggtcgccgacaaccccggcttcctcgacacccttatcgaggccgcccgcatcaccgagggatggcatcacgcgacgcctccgcacattcaggccccttaccggacccttcatcagtgaacggaggtacaacgacatgaccagcgacattgacattgaccggacccacaaacccgacgaccgcgccgaggctcctctttaccgagcctgggccaggagactcgtgcacgtctccgggatgccctggcgtatcgtcgccgccttggccggggtctcccccacctccatgcaccggcttctattcggccgcaacggtcgacccgtggaatggatcggcatcaatgatgctcgcgccctgatggatatcggcatcgatgatctcgcctcagcgtccaccgaccgtatcccggcccgcgaatcccgcgagctgttggtagccctgcacaccctcggctggaccgatgagcatctaagccgctggctgaccagttccgacctcgacctggccaccacccccaaggccctctacgtcacccggctatccgccgcccgcatccaggccacctacgacatgctcatcagccagcccgtccgccgctgcggcc

SEQ ID NO: 211 - DNA, 11765 bp, Propionibacterium acnes
ggtcagtgggcgatggccaggccgacgagggcgccgctgcacaggctgggtgcccagggaaggaatcgggcggtgtggtatcggaaccgatcgattagggcatatagggcgatcagggtaagcccggctatgacagtgacctggatcgtgtcgatgccggttgctgcggccggcgctgcccacagtggtgtgatacgcacgtcggagaagccgaagccgcctcgagagatgacccaggcgatcatccacgctgcgaagatgatggtggtagcgatgacagcacgtgttgccgcagtctggtccgagagggcggtaacgactacagccccgatccatccggcccatccggtccacgctagggctgccggtatccatgtggtgatggcgtcaatgacggcaacccatgccccgatggtggctagcagggcccacgtcggccatgtgggtgctggggcccatgctgtggcggtgatcatggtgagtgctgctgcggtacagaccgcgatcaagcttcgggggctgtaggtgtcgcggtaggcgatcttgtcgggattggcggtagctggttcgggcaggatgcgagtgagggcaggccatcctgcggccgcaatagccacgacggcgaccacccacacgatctgttgcatgggtctcatcatggcccatcatcgatgggtgtgggtggccgacatggggtcactcgtcgaggaggtcgaggggtgtgcgggcaagcatggcttcctgtgtgccgagcatgagggtgccagagtcgtcgccggccgattcccagtcgacgatgacctggtcgccgtcaacgctggattcggcgatggtcacccattgcccgtccatgtcgatgagcatcccggcggccagctctgtggcggcaaccgggcggggtgggctgtagaggaggtcgatgtcgcgggcaaggtcgtcgggttcttcggttacctcgggtggggtcgatctggctgtctcggtgtcgtcggccaggtcggctcccaggatgcgttcccattcggggctggttttcttgcccgctgaggccatcgtctcgtcgatctgttcgtcagtgggccacacaaatttctttttggtccaggtcgtggtgtcgggtcgcagctgatccagcagttccaggtcttgcggggagtgggccttgcgggggtcgggggtgtagaagaattggacttccttgggggctgattcgccggataggtaggtgcctcggccgcgtttgccgaacgggatgcccacgccgacgtgttcggagccgaacatcatgcgggctccgtcagcggacaggggtccggtggcggcacgcccggagaagttgtctcggatttcgccgcccaggaactcggcgtcggggcgttgggtccccagatcgacgtggatacggcaggcggctgccatgcgcagcagggagccgatccagccgaaaacggggcattctccgggcatcccagagaccttgatcgttgaccaccagtttttcgcgttgccgtagaactggcggtactcgtcgatgaggaccagcacgcgggtgaagtcggtctcgcgggccccttcttcttcgatgcggcggtagcggtcctccatgagagaccacagccagtggatgagggcgacctggtcggggacggtagtggcgaccatctcgatgttgggccactcccgcaggcccaggtactcgatgcgtttagggtcgatgacgaagacgcgccagttgcggcgggcaccctcgacggcgtcgccgatcatggacaccgtttttccggtacgggtgcggccggccttgagctggtgcgccatgacaccggagatgtcccagaaacaggtgttgccgtcctcgtcgacggcctgggggattttctcccagtctggggagtctgggcccggaagggccacgggtcggggcaccatcgagggcagggggtggcggcgggtgacggtgatggtgtcgtgttccaggtcgaagtcgctgcgccactggccgagcatcatcgccgaggtcaccgcggccaggcgcaattggatgttcgggctggacaaatgggcgccacgttggtggtgaatggtgaagccgtccaggttcccccgatcggttttccaggaatcgacggtgaccgccgacccatagatctgagtggctacttctttagcccgttccttgtctcggtccagatcggttttgtcagggtcaggggtcggggcgcggtattgcaggacgaaccggccggccgggatcgttgcggatgtcaccgtgaactctgccggcgaccaggcagccgcggccgcctgggtgagggccattggcatggtctcgacggcagcctcctcgggggagatggtgagggtcaggcgtcgcggatgcgtcttcttgcgattccatgtgactttctgcctcaccggcaccttcgccgccgactgaatggctaggcgagctgattcggcagtttcggtacgccggccagcgcgtagcgcccgtcgtgcgtgaaggctgcccaccacagcacagcccatacacggcagccaccagcgcggatcagcggctgctgcatagctccccgtagctagtaccgcacctgaccagccggccgcgatacttttccacgccggtttcgcgccaccaggaccagcgttatggacggtctgcttcgaggctgcggagggacgagacagcggagtgctggtcatgccgcggcctccttgtggcaggtcatttcacaggcatgccggccagcgatgatgccgtggcgcaccgccccggtagccgcatagaccgcgcacaactcaaacacggggcacccatcgcaggccgccgggttcatgctttctttgtcccacgatggtgggtcatcggtgcacggcacggccaggccatcctgttgagcggcgctgatagcggtgaataggcgcagctgggcgcgaacttggtctggggtcaggttgacggtgcgggctacacgcatggggttccttcctcttcaccagtgaaggttccctagacccggccgatgtgcggagggatttcagtgttttatcgaggtgaccagccagccggtctgcgctgcgggttcaggtaccagggtcagatgcagcatggtgtggtcggctaggggcacggcgaccaggggcccgtcggcgctcgccccggtgagggtgggagttccggccacggtggtggcgggaatctggttgggtttcgcggccatcagggagcccatgagggtcggggcggcgatctggacgagggcgactttgcgggcggcgggatcgcgggtcaaccagccgcgggtgaaggtgagcgcagccgacgtgatatcggggctcagcggggctggtgtggcggcggggtgggccgttgaggagggccatacgcgcggtagcgctggcgacatcgagcgggtcggagtggggtcaggtgtggggcttagggtccgatgtggcgatggggctaccgccccggtggtgggagacgagactggttgggggtggtgttgagggcgtgggatcagggtgaaggcagccaaactggccgggatgaggatgacggccgcgccgacacttcggagcgaggtcatgtgacgatccttcggtagctcgacgggttgccgtagatcttttccacgttgatgccactatgtgggttgtcggcgctaaccatttggcctccaccgatgtagacggccacgtggtgggcagggcttccccagaggatgaggtcgccgactttgagctggtcacgggccacagcagtgccgactttctgctggtcggcggcggtgcggggaaggctaatgccgatacgccggtacagcgccgaggtcaggcctgagcagtcgtagccgccatcggctttgccgttgccaccccacacgtaggcgtaggagttgttgtcggcgatcgatttggcccatgccacggcttcggccaggttcttcgacacaccggtctcgttagcggccccggtggcacagttgtttgacaggtgccctgtagtagtggatcccactatttgtttggccatggtttcccatttggcgtaggcatcgggcagggctgagccttgcactgcctgagctgcctgcgtcagcggcatcttctgccagtcagcgatgtcgactaaaccgggaatgtggaatccagggccgccggccgatccggggccagcgtaggtgatggtgtggcctttcaagaacgcctcggtggcgtaggcatcattgttgacctgatccagggtcccgtaccagcccggcaggatgcgctgctgaaaggggccggcgtcaccgtcaccgttagccttcgctgaggtagggtcggccccaagatctgattcttgtttggcggtcatgatagcgatgaccgctgcctgggtaggcagtttgtcacgctggaccacagtgacgatggtggtcacgagctgcttctgcctggccgtgaggcctccggcacccacagtgcctccggtgacggtacccacgcaagcatccccgccgacactgccaccgccgccgccagagttgtcgtcgagggccccagagcctactgacagcagcggcacaatgatcacggtcgctggcaagaccgccaggcccgccagcatcagcactgctgcactcaccacggcgatcacgtgagatgctttcaacgctgcccacctctcgctggtttgagggggcgacgcctgctggtacgcacaggcttggttggtccagtccgccgttggttggcaggcctgggtttgatcggcttgctgggacccggtttgggctccggagtcttaggctccggcttcacatgcctaggcacttcggctgcggtgggaggagtcagcacgtggcgtactggcttggtgaccttctgggcacccgaaacaaccggcttagacaccaccttggcacctttgaccaccggtgcggctgccttcgcgccggccttcttgactgcacgatgcgctttgatagccccggcctcggcccggccaaccctgctagcagtagcatcgagggctctgtggcccgtcgttgccctcaccggtgcatccttgccctgacgggcctgcttcgcgatcatcgacataccgccccgcaacgccgaaacacggttgtgagcgtgggcgacggccgacataccagctgtcgtaattttcgactggccctgcggagctcctcccccggtacggatctgacgatatgacgccgaagcacgccgcgccgccgaggccattcgcgccatcttcgcagcccgggtcactcccaccgacgcgccaccggtgactaccgcagccgcagccgaaaccatccgccttcgacccaatccagtgagcttgcgaccaccgctgcgcaccatccggcgagcaccccgcccagcccactggccaatcgccgacgccccttcagagcgcttactacgcatccagtcgttgatcttggccctcagcccctcctcacccttgtgactacgccacagagacaccaagaatccgatgattcccacgatttccaacatgttgacgaccatgaccttgatgacaacgttgccatcagaggcgaagaccgacttgatgacgagcatgaccacgcccaacatcaccatcgacccaacaatgccgatcatcgagtacaagatcgaacacagatcccggataagcgggtctgtgcgaccaggaatagcccgcaacacgttgagcatcgacatgaacgccgaccacaccaacttgcacacgtagaaccagcacatgcccgcgaacaccagcaggattgctgccaaacccgccaccgtcgacgagtaaaagaagaaccccaccaaccaggaaccgtccgcaatatcgccggcgtaatccgacaacccctcgtcacaatcaccaaggtcgtcgcgagcatccgagacgtcatcgtaagggccacccttgagcacctcgatgtacttgtcgtggcacttcgcatcaataatccggccatagttgagctgctgatgaaccggcgccacgaacgagtccacaatgatcgccgacagcttcggagccttcgagtctcccgtcgaggtcatgtcatcaggaacctcaacctcaccagcggtcgccgtcccaggatcaaccgaactagtaatcatccgagacagcgccacaccgaactgctgggtgcgagccaacggagtagccaacgtcgtcgtatcacctgcaaaattcgccaccggggccgccaagaaacccaacgccagcgccgcagcaatcgccgcacgcgcacccgtagcccacgccccagccgtacgtcccctcatcatcttgacgaccacgcccacaccggcgcacgtcgtcagcaacgtcaacaccgttccaccccagctgtccgctcccagcggggccaaaaccttgtcgtggatgtcgttctgcaaccccaccagcggtccggtaatccacccgacccagctcatcgccacggtccagtccaacaaccggcacaacagggcaacgaccatcaggtacgtgttccaacacatgccaataatggaggcccacatagccttcagcggggccgtaacgccaccatcgtccatcgacatctggtactgaaacaagtgaataccgttggagtcagtcacattgaaaccgtcacccatccagcccagcccaggacccgacgccatggcaggcacactgctcagcgccaccaccagaaccagcgtggtgacgatgatacggaaccgccgctccccggccccggggcggcgtggatgacggctcacgctgtctcccggtcgtgctcgggcgggttggagctggcggcttcgcggtggggagcgtaggcaggtctcagtagtcgaatttcaccgacgttgccgtgttggtcggcgtacaggccacaaccggggcctccggggttgagggcaatcttgaccaggtcagcgaactcttcaggggacgttttagggtccacgcccaggaactcgacacctttctgggcgaggttgatgttgtcgcacagcaacacgatgcgatgctgaatgaggttgcggacggtctcgttggggtaatcggcctcggggtcgtgggagccggtgataagccaggcattggctcggcgggattcgcgcacgtactcgtcaatggcgtgggaggcttccggcgaggacgacatgtgatgaaactcgtcaacaatgaaagcggcgtcgcgggcccggtcgctgaagcacaccaggcgagccagacgggcaatgagcgcgtagagggctcggccaaacaccttgtgcgggggcagctgccgaaacaaatgttctgacagcatctcctcggcgttaggaagagcgatgccacaagtgccaatgatgaggatgtcggcactcaggtcggcgggaggaaggtccgggtcaaagatggccgaagctagggaggccgagttctcgatgtcagcgaacacggcaatcctgtcagcgatcgcggtggcctcgggaaggtcgcactcctcggccaggtggcgggccaaacgcccacacgaggtgatctggtggtcacgcatgtaggccggtttgaggaccttggccagcgtggtcccggccacaccgatggtctccaagttaagcaaggtcagcaagaacgactgggcgacctgcccggccatctccgggggaaggatgcgcagcgggtccagcgacagcttggggtgggccgtgtcgacgatctggcgtctaaccccgtcgatagagttgacaaaggttacccactcccgctcatcggagttgtcggtggcaataatgcgcccgccccgggccgcgatggctgcgcacagccgcttctcggccatcgtcttgcccgcgcccatcttgccgatgaacgccaccgtgttgcctttctgatcctgagtgtcggcatgcaaatcgaggtaggccagcgactgcaacggggagcctgtgaccacagccaacgggatgccggtggtacggcccaaccggtactcaaccaccgggatagatgcggcgaacgcggaggcgtgagtcagctgacggtaggcgttaagcgaggaggagaaccggccaccgggccgggcagcccacagcaagtcctcctgacggcccacgggacgcacccacgtgaagtcaccgaacaccggatcattgacgaacgctcctgccagctcctcggtggtctcaaagtcaggagacgagacagtgacggtgataagagcctggatctcgacctcacgctcatcggcggccagctcggcgttgtagtcgacgagcacctgagcggaatgctcgatagacatgagggtcgaagcctgggtcatctcaccgccctcgacgttgtcgagctgatcgaccgtttgacggatagcccgctgatttttctgcatcgcagcgtgacgggtccgggccactccccggatcgccacgtcgaccggcacgccagtgtcgtcgatacggcccaaaaactcgtaggcaggccacgtcatcgtgcggggcaccttacccagcacgatatgggactggtagacggtctcgccggtgtcggcaccgattttgaggacgcgacgattccacgcctgagccgtccgggacatgtgggagactcgcttgtcatcctcgctggccagcaggtcggaggtcgcggcctcatcgatgaccaactcccccagcgcggcacgtccaacctcatccatgagggcgattccctcgccaggggcatcatcacgcaaccgggtcgggtggcctgacaggtgctgccgaagccagatctgttcatcaacggtgaccgggcggggttggaacgctgccggcagtttcgcaccgaattccttagcctgacggagggcccactcccgtgcgacacggccaggagcggtggtcatgagtccggcggcttcggtgattttgttgagggcggcggtccaggcggtgtgggtgcgtattttctggtcttggttgagtttgatcgataggaaccacacgcgccggcctagggattcggtttcaggctggtcgagggtggcgtcgatttcgtcggcccacacggggtgttcgctcaggtcgaggccggcggccatggcgtcgacgatttctgtggggtcggtccaggtgagggctccgttgaggcagaactcgtggcgggcgagggggcggaataggtcgcggtgagctgcggcgacggtgagggaggcgttctcggtgacgggtcgctggaggggagtgagtcgccaggtggcccagatgtcgccggtggaggtccagacgaggttgtcgaagaggaaccgttcggggatggacatcatgactccttttcggcggcggcgaggaaggcttccaggccgctgcggcgtacagcgttcccggtagggtgcaggggttttctgggggtgggttcagatttcgaatgtgggaggggtttgtggatggtatcggtgtcctcggcgagggcttggtcgagcaggcaggtggccggggtgtcggtagtctcgtccagctcgtcgatcatctcgtcgaggaggttgggggtggtggatgcggcccacacaggtgggatagccggtgcgggtcgaggcggtgtggggaggcggagtttggtttggccccagaggggtgtgtgggtcatgccggcgggagtggtggcggcgtgagtggtcacacgccaccagcccgccagccatgccagaggtgaccaggtccagtcgatgcgaccaacaacgaactgggcgagccatccggcagccagcgcgaaaatgaaaccgcggatggtcatgcccccgtcgataattttgaagcccatcatcgcggcaggaactacgccgccgacagcgagcacctgatagatcgtgtagggcccgccaggaatccttcgacctgaggaatccttaccgataatgcggggctgctggcgggcctcggtgtgccactgaatatccacgatcagctctttcccaatccttgcatcatctgtccgaagaattggatcgcgttaccttcgataagccagtgcgccataccacacacaaacagcatggagacgatcttggccaggctcataccgtgtttgaagatgttgaacgcggcaatgcccacgactacgaccatggcgacggctcgcaccgcggactgaccttcacctgccttgatcgtcgtccattcgaagaggttctgcgattccagtggcagcaggaggaattgatcgagcatgagaggttttcctttcaggaagccgaccgggatggtcccggtactgacgggctggacggcacgggtgtgccggccaggggcagaaggcgtgacggctggtcgagggaggcaacctcccagcggcctgcacggctgacaagagtcaggccgtactggctggtccgggtagtggattcgtcgccggtgggctggcatgtcacggtcaccgtgacggtaatcttctgccggtctgagggggtggggacctcgtcaggtcccaccacatgagtggttttcactgatacgcatggggctgggtcaaccgcggtgaaagcggtccctgggctgctccatctcgacaggtcggtattcccggtcagcatggcggttaggaagcctgaagaggcttgggcggccgggtcggcggtgcgaagctccgaggtgtctagggtgggggctgaggccggtgcaggcatggggatctgtccaggtagacgcaaggcgatggccttgccgttggaatcgacgtggaccgggactgaccaggcctgtccgctcccggattggccgcccatggtgaccacggtgacctgccacaggctcggatcagacggggagacggtagcgtcataggcggtgacggtggtgggcgctggaccaggtttgcggggcatgcgcgcatcggtgatcttggccgccaccaggtgttccagattgtccaagtgcccggagtcagaggtcagcagaagagtagtcacctcgaccgcggtggctgaggcgatctgagctgtgcggcggtcgtgatgggtggtgtcagtgctgacagctgtggtgggagcggatgccggggccgccgaacggaccagggcaacggggccgcatgcgactccgcacagcacgagggcaaggaagcctttggtggccatcgatccggtgtggggccagggacccacgttttcctgtgcctgttttttcttggccgaccaacggcgggacttagggttagcggatgcaccttctggggtgcatgctcgtctcaatcgcatcggtcacctccttcactggatgaagggaccaaggaggtgaccgatgtgcggtcgaacccgaaaaagttcaaacttttttctgggtctgcctcaagtacgacagaaggcctgcatcatcacggcgttgtggtagcagatcttgcgtcagcgcaaatgtatgggcctcgtaggagtagctcttaggtgggtcccggtggttgcggccagggcgagggtgtcgggtatgtgtagcgctagtcccgggttcgtggtgtgagggcttttgggtgctgacatgcactacccattgctagacgctgtgctgtggcatggctggacgtctagcagacgggttgacatcacctttaggctggcagcgcccgaggccgcaggccagaggaagcggacagcctaacgattgacgtccccctctcctttccccaacctcctggagtcgatgacccggagatagatcgatgtctatgcatcggtgcatcgatatacctatgtatctgtctgtggtttttagaggccactcccgtcgccccgggccgctcagcgataccgcaaggctgtgtgggatcagct

SEQ ID NO: 212 - DNA, 2055 bp, Propionibacterium acnes
gcgagccacgaccatcgccaagctgaatggagagcgagcatgagcaccacccctgccgggttcgacttcgacgctctggccgagtgggccgagagcgatgaggcgacccacaccccgcaaaccagccccgtgttccggggcaaggacgccgcgcgcgccagccgcgcattcctcggccgaggacggcccaccctaggcgcggaccacgccaccggcgagggccggtcgccccgccgtcaggtacggctcgacgcacgcaccaacgcgcgactcgacgcctacgcagccgcaaccggcaccagcgcctcccagatcatccgcgacgccctcgctgactacctgcccgcctgatcccaccccaatccactcgggcgcctgtcagtgccccctcttctgggtggtggtccggggcgtcaccgccccggaccagttgggtagtcatctcagttgaaataagcgattagtgatacgcccctcatgctttccggtgctgtcatgagcgtctgacaacagcgacacctcggggcagccgacggacagtcctctggctgccgctctgatcccatgcccacggcacgaaggtgtcggacagctcggtctcgtcatgtgcccaaatagcgtcgtgggcctgtcgccaagcttctcgggagccccacacgggcacgaccgggccacaccggtgtcctggcctccagtgtcgcgacactgtcgatttcggtacgtgcaatgcggcggcggtttgacggatcgacatcccagactcccgcgcgtcccagatcgccatgtggagagtatttgcctccagtgcggccgccacacttgcacgctctcgcgcacgctcgaatgcccgcctagtgctctcaaatgtcgtcacgacgcctccccctgaaaatactcagggtgtcccacggtgggacaccctgagtatttcataccccaactcgcctcaccacacgtcgacctcgacaccgatcaagcgacccgtatcagcgacattgccgtaccgctgccccgcctggtcctccagccacgacaacgcatcccgaaacagcccgacgtcttccaaagctaaaccacagtcgtagccgcccttgtcccccaaccgcacaatctggcgctcccggtggcctccctcgtcgacctcgatccacagtttcgcgtgcatccgctggcctcggccctctgacaggatctcggtgagcaggtcggacgcctgccctcgcgcatcttcgttactgcgggggaattggagtatgtgggaggaacgatgatgggggaggttggtgacctcatggcgcagcaggttgcgcttgtgcatctgctggtcgagacggtcgggctgacctgttgacggggttgagccgtggcgccgcttcctcggcggggtctcgatccgttgctcttccggcggttcggcgtcaggttgtggtgcgcgatctcccctaggacgggggggctcgccacctatatccgagggacgatgagacggccttccacgcttgctgcgcactttcgcagcccgccccttgcggtcacgtcgacgcggcggcggagtgaggtcctcaccgcgcgctagctgcgtcaacgccgccaccaggttggtgcccggtttcagccctttcagcacgtagcgcagcaggcgggggtctcgcttgattcgtcgagcgatctcattctggctccacccctcggccaccagggtgcgcagcagatcctgggcccggctgtcacgctcagccacggctcaccccctcagggatgcctgcctgctcggcctgctctgacagggctgctcgttccgatccggtctgcggcgcttccagagggccaggcaagacacccttgacacgcagccgaccatccttgccatcgtcgccgcccccctgggccacagagagcgcccaggtaggcacgctgctggtgtagatggcgtcgccgtgaatggccagcagacagcgagttctcaacgctcctcccctggttgtggcgtttttcccggtggcggggtcagcgatgggtgtgttgagggtgcgcacgcgcgacagagcccagata

SEQ ID NO: 213 - DNA, 11284 bp, Propionibacterium acnes
gtccacgctagggctgccggtatccatgtggtgatggcgtcaatgacggcaacccatgccccgatggtggctagcagggcccacgtcggccacgtgggtgctggggcccacattgtggcggcgatcatggtgaccgcagccgcggcacagaccgcgatcaagcttcggagactgtaggtgtcgcggtaggcgattttgtcgggggtggcggtggccggttcgggcaggatgcgagtgagggagggccatcctgcggtcgcaatggtcacgacggcggcgatccacacgatctggtgcatgggtctcatcatggcccaatatcgatgggtgtgggtggccgacatgggctcagtcgtcgagaggtttgcgggcggttgtggcttcttgggtgccgaggatgagggtgccggagtcgtcgccggctgattcccagtcgacgatgacctggtcgccgtcaacgctggattcggcgatggtcacccattgcccgtccatgtcgatgagcatcccggcggccaggtctgtgacggcaaccgggtggggtgggctgtagaggaggtcgatgtcgcgggcagggtcgtcgggttcttcggttacctcgggtggggtcgatctggctgtctcggtgtcgtcggccaggtccgctcccaggatgcgttcccattcggggctggttttcttgcccgctgaggccatcgtctcgtcgatctgttcgtcagtgggccacacaaatttctttttggtccaggtcgtggtgtcgggtcgcagctgatccagcagttccaggtcttgcggggagtgggccttgcgggggtcgggggtgtagaagaattggacttccttgggggctgattcgccggataggtaggtgcctcggccgcgtttgccgaacgggatgcccacgccgatgtgttcggagccgaacatcatgcgggctccgtcagcggacaggggtccggtggcggcacgcccggagaagttgtctcggatttcgccgcccaggaactcggcgtcggggcgttgggtccccagatcgacgtggatacggcaggcggctgccatgcgcagcagggagccgatccagccgaaaacggggcattctccgggcatcccagagaccttgatcgttgaccaccagtttttcgcgttgccgtagaactggcggtactcgtcgatgaggaccagcacgcgggtgaagtcggtctcgcgggccccttcttcttcgatgcggcggtagcggtcctccatgagagaccacagccagtggatgagggcgacctggtcggggacggtagtggcgaccatctcgatgttgggccactcccgcaggcccaggtactcgatgcgtttagggtcgatgacgaagacgcgccagttgcggcgggcaccctcgacggcgtcgccgatcatggacaccgtttttccggtacgggtgcggccggccttgagctggtgggccatgacaccggagatgtcccagaaacaggtgttgccgtcctcgtcgacggcctgggggattttctcccagtctggggagtctgggcccggaagggccacgggtcggggcaccatcgagggcagggggtggcggcgggtgacggtgatggtgtcgtgttccaggtcgaagtcgctgcgccactggccgagcatcatcgccgaggtcaccgcggccaggcgcaattggatgttcgggctggacaaatgggcgccacgttggtggtgaatggtgaagccgtccaggttcccccgatcggttttccaggaatcgacggtgaccgccgacccatagatctgagtggctacttctttagcccgttccttgtctcggtccagatcggttttgtcagggtcaggggtcggggcgcggtattgcaggacgaaccggccggccgggatcgttgcggatgtcaccgtgaactctgccggcgaccaggcagccgcggccgcctgggtgagggccattggcatggtctcgacggcagcctcctcgggggggatggtgagggtcaggcgtcgcggatgcgtcttcttgcgattccatgtgactttctgcttcaccggcaccttcgccgccgactgaatggctaggcgagctgattcggcagtttcggtacgccggccagcgcgtagcgcccgtcgtgcgtgaaggctgcccaccacagcacagcccatacacggcagccaccagcgcggatcagcggctgctgcatagcccccggtagctagtaccgcacctgaccagccggccgcgatacttttccacgccggtttcgcgccaccaggaccagcgttatggacggtctgcttcgaggctgcggagggacgagacagcggagtgctggtcatgccgcggcctccttgtggcaggtcatttcacaggcatgccggccagcgatgatgccgtggcgcaccgccccggtagccgcatagaccgcgcacaactcaaacacggggcacccatcgcaggccgccgggttcatgctttctttgtcccacgatggtgggtcatcggtgcacggcacggccaggccatcctgttgagcggcgctgatagcggtgaataggcgcagctgggcgcgaacttggtctggggtcaggttgacggtgcgggctacacgcatggggttccttcctcttcaccagtgaaggttccctagacccggccgatgtgcggagggatttcagtgttttatcgaggtgaccagccagccggtctgcgctgcgggttcaggtaccagggtcagatgcagcatggtgtggtcggctaggggcacggcgaccaggggcccgtcggcgctcgccccggtgagggtgggagttccggccacggtggtggcgggaatctggttgggtttcgcggccatcagggagcccatgagggtcggggcggcgatctggacgagggcgactttgcgggcggcgggatcgcgggtcaaccagccgcgggtgaaggtgagcgcagccgacgtgatatcggggctcagcggggctggtgtggcggcggggtggggcgttgaggagggccatacgcgcggtagcgctggcgacatcgagcgggtcggagtggggtcaggtgtagggcttagggtccgatgtggcgatggggctaccgccccggtggtgggagacgagactggttgggggtggtgttgagggcgtgggatcagggtgaaggcagccaaactggccgggatgaggatgacggccgcgccgacacttcggagcgaggtcatgtgacgatccttcggtagctcgacgggttgccgtagatcttttccacgttgatgccactatgtgggttgtcggcgctaaccatttggcctccaccgatgtagacggccacgtggtgggcagggcttccccagaggatgaggtcgccgactttgagctggtcacgggccaccgcggtgccgactttctgctggtcggcggcggtgcggggaaggctaatgccgatacgccggtacagcgccgaggtcaggcctgagcagtcgtagccgccatcggctttgccgttgccaccccacacgtaggcgtaggagttgttgtcggcgatcgatttggcccatgccacggcttcggccaggttcttcgacacaccggtctcgttagcggccccggtggcacagttgtttgacaggtgccctgtagtagtggatcccactatttgtttggccatggtttcccatttggcgtaggcatcgggcagggctgagccttgcactgcctgagctgcctgcgtcagcggcatcttctgccagtcagcgatgtcgactaaaccgggaatgtggaatccagggccgccggccgatccggggccagcgtaggtgatggtgtggcctttcaagaacgcctcggtggcgtaggcatcattgttgacctgatccagagtcccgtaccagcccggcaggatgcgctgctgaaaggggccggcgtcaccgtcaccgttagccttcgctgaggtagggtcggccccaagatctgattcttgtttggcggtcatgatagcgatgaccgctgcctgggtaggcagtttgtcacgctggaccacagtgacgatggtggtcacgagctgcttctgcctggccgtgaggcctccggcacccacagtgcctccggtgacggtacccacgcaagcatccccgccgacactgccaccgccgccgccagagttgtcgtcgagggccccagagcctactgacagcagcggcacaatgatcacggtcgcgggcaagaccgccaggcccgccagcatcagcactgctgcactcaccacggcgatcacgtgagatgctttcaacgctgcccacctttcgctggtttgagggggcgacgcctgctggtacgcacaggcttggttggtccagtccgccgttggttggcaggcctgggtttgatcggcttgctgggacccggtttgggctccggagtcttaggctccggcttcacatgcctaggcacttcggctgcggtgggaggagtcagcacgtggcgtaccggcttggtgaccttctgggcacccgaaacaaccggcttagacaccaccttggcacctttgaccaccggtgcggctgccttcgcgccggccttcttgactgcacgatgcgctttgatagccccggcctcggcccggccaaccctgctagcagtagcatcgagggctctgtggcccgtcgttgccctcaccggtgcatccttgccctggcgggtctgcttagcgatcgccgacatgccgcctcgcaatgccgaaacatgattgtgggcgtgggcgatcgccgacatgccggccgtcgcgatttttgactggccctgcggggcccctgccccagcacgaatctgctggtaagccgccgacgtgccacgagcacccgccgccattcgcgccaccttcgcagccctagtcactcccgtcgacacgccacccgtggctaccgcagcagcacccgagaccacagtcgaggccatccgccttcgacccaatccggtgagcttgcgaccaccgctgcgcaccatccggcgagcaccccgcccagcccactggccaatcgccgacgccccttcggaacgcttgctgcgcatccaatcgttgatcttgtccctcagccccttctcgcccttgtgacgacgccacatggacatcaagaacccgataatccccacgagctcgagcatgttgacaaccatgaccttgatggcgacatcaccgtcagaggcgaaaaccgacttgatgatgagcatgaccacacccaacatcaccatcgacccgacaatgccgatcatcgagtacaagatcgaacacagatcccggatgagcggatctgtgcggccagggatagcccgcaacacgttgagcatcgacatgaacgccgaccacaccaacttgcacacgtagaaccagcacatgcccgcgaacaccagcaggaccacagccaaacccgccaccgtcgacgagtaaaagaagaaccccaccaaccacgaaccatccgcaatatcgccggcgtaatccgacaacccctcatcacagtcaccaaggtcgtcgcgagcatccgagacgtcatcgtaagggccacccttgagcacctcgatgtacttgtcgtggcacttcgcatcaataatgcggccatagttgagctgctgatgaaccggcgccacgaacgagtccacaatgatcgccgacagcttcggatccttcgagtctcccgtcgaggtcatgtcatcaggaatctcgacctcaccagcggtcgccgtcgcaggatcaaccgaactggtaatcatatgagacagcgccacaccgaactgctgggtgcgagccagcggagtagccaacgtcgtcgtatcgcctgcgaacttcgccaccggggccgccaagaaacccaacgccagcgccgcagcaatcgccgcacgcgcacccgtagcccacgcccctgccgtacgtcccctcatcatcttgacgaccacgcccacaccggcgcacgtcgtcagcaacgtcaacaccgttccaccccagctgtccgctcccagcggggccaaaaccttgtcgtggatgtcgttctgtaaccccaccagcggtccggtaatccacccgacccagctcatcgccacggtccagtccaacaaccggcacaacagggcaatgaccatcaggtacgtgttccaacacatgccaataatggaggcccacatagccttcagcggggccgtaacgccaccatcgtccatcgacatctggtactgaaacaagtgaataccgttggagtcagtcacattgaaaccgtcacccatccagcccagccccgggcccgatgccatggcaggcacactgctcagcgccaccaccagaaccagcgtggtgacgatgatacggaaccgccgctccccggccccggggcggcgtggatgacggctcacgctgtctcctggtcgtgctcgggcgggttggagctggcggcttcgcggtggggagcgtaggcaggtctcagtagtcgaatttcaccgacgttgccgtgttggtcggcgtacaggccacaaccggggcctccggggttgagggcaatcttgaccaggtcagcgaactcttcaggggacgttttagggtccacgcccaggaactcgacacctttctgggcgaggttgatgttgtcgcacagcaacacgatgcgatgctgaatgaggttgcggacggtctcgttggggtaatcggcctcggggtcgtgggagccggtgataagccaggcattggctcggcgggattcgcgcacgtactcgtcaatggcgtgggaggcttccggcgaggacgacatgtgatgaaactcgtcaacaatgaaagcggcgtcgcgggcccggtcgctgaagcacaccaggcgagccagacgggcaatgagcgcgtagagggctcggccaaacaccttgtgcgggggcagctgccgaaacagatgttctgacagcatctcctcggcgttaggaagagcgatgccacaagtgccaatgatgaggatgtcggcactcaggtcggcgggaggaaggtccgggtcaaagatggccgaagctagggaggccgagttctcgatgtcagcgaacacggcaatcctgtcagcgatcgcggtggcctcgggaaggtcgcactcctcggccaggtggcgggccaaacgcccacacgaggtgatctggtggtcacgcatgtaggccggtttgaggaccttggccagcgtggtcccggccacaccgatggtctccaagttaagcaaggtcagcaagaacgactgggcgacctgcccggccatctccgggggaaggatgcgcagcgggtccagcgacagcttggggtgggccgtgtcgacgatctggcgtctaaccccgtcgatagagttgacaaaggttacccactcccgctcatcggagttgtcggtggcaataatgcgcccgccccgggccgcgatggctgcgcacagccgcttctcggccatcgtcttgcccgcgcccatcttgccgatgaacgccaccgtgttgcctttctgatcctgagtgtcggcatgcaaatcgaggtaggccagcgactgcaacggggagcctgtgaccacagccaacgggatgccggtggtacggcccaaccggtactcaaccaccgggatagatgcggcgaacgcggaggcgtgagtcagctgacggtaggcgttaagcgaggaggagaaccggccaccgggccgggcagcccacagcaagtcctcctgacggcccacgggacgcacccacgtgaagtcaccgaacaccggatcattgacgaacgctcctgccagctcctcggtggtctcaaagtcaggagacgagacagtgacggtgataagagcctggatctcgacctcacgctcatcggcggccagctcggcgttgtagtcgacgagcacctgagcggaatgctcgatagacatgagggtcgaagcctgggtcatctcaccgccctcgacgttgtcgagctgatcgaccgtttgacggatagcccgctgatttttctgcatcgcagcgtgacgggtccgggccactccccggatcgccacgtcgaccggcacgccagtgtcgtcgatacggcccaaaaactcgtaggcaggccacgtcatcgtgcggggcaccttacccagcacgatatgggactggtagacggtctcgccggtgtcggcaccgattttgaggacgcgacgattccacgcctgagccgtccgggacatgtgggagactcgcttgtcatcctcgctggccagcaggtcggaggtcgcggcctcatcgatgaccaactcccccagcgcggcacgtccaacctcatccatgagggcgattccctcgccaggggcatcatcacgcaaccgggtcgggtggcctgacaggtgctgccgaagccagatctgttcatcaacggtgaccgggcggggttggaacgctgccggcagtttcgcaccgaattccttagcctgacggagggcccactcccgtgcgacacggccaggagcggtggtcatgagtccggcggcttcggtgattttgttgagggcggcggtccaggcggtgtgggtgcgtattttctggtcttggttgagtttgatcgataggaaccacacgcgccggcctagggattcggtttcaggctggtcgagggtggcgtcgatttcgtcggcccacacggggtgttcgctcaggtcgaggccggcggccatggcgtcgacgatttctgtggggtcggtccaggtgagggctccgttgaggcagaactcgtggcgggcgaggggcggaataggtcgcggtgagctgcggcgacggtgagggaggcgttctcggtgacgggtcgctggaggggagtgagtcgccaggtggcccagatgtcgccggtggaggtccagacgaggttgtcgaagaggaaccgttcggggatggacatcatgactccttttcggcggcggcgaggaaggcttccaggccgctgcggcgtacagcgttcccggtagggtgcaggggttttctgggggtgggttcagatttcgaatgtgggaggggtttgtggatggtatcggtgtcctcggcgagggcttggtcgagcaggcaggtggccggggtgtcggtagtctcgtccagctcgtcgatcatctcgtcgaggaggttgggggtggtggatgcggcccacacaggtgggatagccggtgcgggtcgaggcggtgtggggaggcggagtttggtttggccccagaggggtgtgtgggtcatgccggcgggagtggtggcggcgtgagtggtcacacgccaccagcccgccagccatgccagaggtgaccaggtccagtcgatgcgaccaacaacgaactgggcgagccatccggcagccagcgcgaaaatgaaaccgcggatggtcatgcccccgtcgataattttgaagcccatcattgcggcaggaactacgccgccgacagcgagcacctgatagatcgtgtagggcccgccaggaatccttcgacctgaggaatccttaccgataatgcggggctgctggcgggcctcggtgtgccactgaatatccacgatcagctcttgcccaatccttgcatcatctgtccgaagaattggatcgcgttaccttcgataagccagtgcgccataccacacacaaacagcatggagacgatcttggccaggctcataccgtgtttgaagatgttgaacgcggcaatgcccacgactacgaccatggcgacggctcgcaccgcggactgaccttcacctgccttgatcgtcgtccattcgaagaggttctgcgattccagtggcagcaggaggaattgatcgagcatgagaggttttcctttcaggaagccgaccgggatggtcccggtactgacgggctggacggcacgggtgtgccggccaggggcagaaggcgtgacggctggtcgagggaggcaacctcccagcggcctgcacggctgacaagagtcaggccgtactggctggtccgggtagtggattcgtcgccggtgggctggcatgtcacggtcaccgtgacggtaatcttctgccggtctgagggggtggggacctcgtcaggtcccaccacatgagtggttttcactgatacgcatggggctgggtcaaccgcggtgaaagcggtccctgggctgctccatctcgacaggtcagtattcccggtcagcatggcggttaggaagcctgaagaggcttgggcggccgggtcggcggtgcgaagctccgaggtgtctaaggtgggggccgaggccggtgcaggcatggggatctgtccaggtagacgcaaggcgatggccttgccgttggaatcgacgtggaccgggactgaccaggcctgtccgctcccggattggccgcccatggtgaccacggtgacctgccacaggctcggatcagacggggagacggtagcgtcataggcggtgacggtggggggcgctggaccaggtttgcggggcatgcgcgcatcggtgatcttggccgccaccaggtgttccagattgtccaagtgcccggagtcagaggtcagcagaagagtagtcacctcgaccgcggtggctgaggcgatctgagctgtgcggcggtcgtgatgggtggtgtcagtgctgacagctgtggtgggagcggatgccggggccgccgaacggaccagggcaacggggccgcatgcgactccgcacagcacgagggcaaggaagcctttggtggccatcgatccggtgtggggccagggacccacgttttcctgtgcctgttttttcttggccgaccaacggcgggacttagggttagcggatgcaccttctggggtgcatgctcgtctcaatcgcatcggtcacctccttcactggatgaagggaccaaggaggtgaccgatgtgcggtcgaacccgaaaaagttcaaacttttttctgggtctgcctcaagtacgacagaaggcctgcatcatcacggcgttgtggtagcagatcttgcgtcagcgcaaatgtatgggcctcgtaggagtagctcttaggtgggtcccggtggttgcggccagggcgagggtgtcgggtatgtgtagcgctagtcccgggttcgtggtgtgagggcttttgggtgctgacatgcactacccattgctagacgctgtgctgtggcatggctggacgtctagcagacgggttgacatcacctttaggctggcagcgcccgaggccgcaggccagaggaagcggacagcctaacgattgacgtccccctctcctttccccaacctcctgga

SEQ ID NO: 214 - DNA, 9776 bp, Propionibacterium acnes
tgtgtgggatcagctgtgccgctcccccgacatggcagacagcaccgttgcatgagaactgactgacactgtggcgccgcggaggtctcccgcggcgtccgctggggcgagtgcatgcctgtcagctcatcttttatcgtcatgtttccccttgtcagagcggtctttgcaaagtgacaacgtcaggggtcttgacgacaacatcctcgacaacatcgtggcggtggtctgtgtctcgtcagttcaacgcaccggggaaagaggcaccgctgatgttcaccaccacaaacaccctcaacgatgagtgggaccagattcgcgccactgagatcgattggcatgactgccctgaactgatgcactgcatcgacgttgatgatgtgttggccgtcattcctgccgcccccgacgccatcttgggctacctcattgcccgggctcagggcggtgacgagttggccacccgcactatcatccaagcgttcacaggcaagcttatcttgatggccacggccaccaaggtgcgccgtactaatgacggcttcaatgatctgttggcgggtctgtgggagacgatcatcacgtacccgttggatcgtcgccctgacaagatcgctgcgaacctcatcctcgacacgttgcaccgggttacccggttctggcgtgctgattcccccgatgaggaagaggctcacggtctggtgcccttccctgacactctcatcgccccagagcccgatgaggacgtcacagctagccaggccatcgccttggcggtggaccgcaactggattaccgaggacctagcccgcctcatgagccatatttactgtgacggtatgactggagctgatgcgggtcgtctgcatggctgcgctccagctacggtgcgatctcgatgccgtgatggtcgggccgtgttgcagcgcaacgccgagacgatcctggccgtctgctgatccctctcttgctcatgcctgccgccaccctacccctacctgctagaaacatagccatgtctccagcaacgcatctagcatatcttctagcaattgatctagctatgtatatagctgatgatctagctatcatatagctgtgtctccagcccaaaggacagcccaatggcatgcttgccacaggaaggtgcgtcagcctcccgaaatactggaaggagctttaccgtgcaggacatgacctcgaccagaccgattgaccgatccccgttcgaccgcactattgcggtgtggaaccacaaaggcggcacgttcaagacgtccgtcgtggcgaacctgggatacctgttcgccgccggtggcaacaaggtgctgctggtcgacatggacccccaggccaatctcgacattgacttcggtatacccgcgggagaacgtgaacggggcatgggattagccgaggcgctacgtgaggggacggcccttcccccaccgcagcatctcagcgaaaaccttcacctggtcagtggcggcgctgctctcaacgagttcaccgaccccgcatccttagcggccatcctcgaccgagtcaccaccgcacgctacgacctgctagctcaggcccttgccccgctggcctgggactatgacctcatcttcatcgactccgggccggcacaaactctgctgtcccagaccatccttggagtagcccgctggctggtagtgcccacccgcaccgataacgcctcaatcactggcctcgtcgacgttcaagacgccatcgacggggttgcctcctgcaaccctgaccttcaactactcggcgttgtcctagccggcgtgggggcccgggccacccggatcgccgcagataaacgccacgccatcgacacagtgctgggggcaggaaccgttttcgatgcggtcatccactactccgagaaggtgtccgtgctcgcacgccagcagggcaagaccgtcgccgagctagccaacgagtaccacaacacccagcccgcctacacctacctagctaaaggccagaacatccccaacgtcgccaaggcagccgtcagcatcgaaactgattatctgaggctggccaccgagatcagcgaccgcatgttcaccagcgacgagcaggagcctgatcatgactgacgatccgactccatccgagcagaacaaccccaccagcgacgacatgcgcttggccgaagaatgggccaacagcggccgcacagtgggagccctgccgcgccgtcaacggcctcagcgacccacaccccgcaccaccagccaaccccctgtctcgtcccctgacacaccggctccgaaaaaaccccagaagacccccaccagccagcctggccgtcaacggatcaacgtcaccgtctacgttgtgcccgaactccatgagcggctgcgctcccgatcggcggcgacgggggtgacggtctcggatctggtggtgcatgcgttagcgttcgtcgccgatcatgcgggggaggcgatcgccgatgatctgcgcgtcgagacgggccccggcatgggggccggactgttcgatgtgaccccatcgcggccagtaggggtcgccaaaacccagctgggggtgcgaatgacccgccacaacaaggatggtttggaccagctgacccggacgagtggagcccgtgaccgcagccatcttgtgtctgtcgccgtgcgcgactatctcgactccaaccctgtaaagaaaggccgacatgtccgctgatgaaactcctgccgcccggggtgggcgacgctttgatacgaccgtcaagcccaggcgccgtcccatgcttatcgccgccggtatcgccatcgtgatagtcggcgcgctcctcatcactcagttgattcgctccgcccaaaccgagcatcgcgtgctggaagtccacgccgatgtggctcgcggcgaggtcatccgtgacaccgatctggtatcggtgactgtcggccaggtcgacaacgtatcaacggttcccgcagaccagctcgactcactggtcggcaaacgcgccacggcagatcttcgagccggatcactcttgcctgctggggctatcggcccggccgatgtcgttccagctccgggcaagtcgctggtcgggctgaagctagccgccggacagatccctatcggagaccttgctgccgggacgaagctgcgcctgatccagacgtcggcacccagcggctcatccaccaccactgatagcagcaccaataccgatggccagtcgtgggaggcaacaatggcgaccggcaccaaaaagaccgagcaggtcaccttgatcaacgccgaagtgaactcgcgtgatgccgcccggatcgcccaactgacgtcacagggccgtatcgccgtagtgaaggatccgatccgatgagcaccattgttttgaccagcgtctcgggagccccaggggtcaccacgacagcgatcgggctgggcagggtctggccacaatcgagcctggtcgtcgaggatgacacccaccacgccatgctggcgggctacctgcgagcctcccagcacgccgaaccgaacctggccgcagtggcgaacctgacgtcgactccaaccaacgcccaaacggtgtgggaatctatcgccagacccctacccaccgatgacccagtcggcgggctgcgacgcaaaggcatcctcggcccgcccacgccgtggtctcgcgcaggcatcgacccccgatggggattcatgctggccctgtggcggcaactggaggaggctggcatcgacaccatcatcgatttgggtcgcctagccacaccactgacctcaacgccacacctgatcgccgcacccatcgtcgaggacgccgacatgatcttggtgatgatcgaggcgacactacgcgacatcgccggcgcccgcacgatggtggagggactcgctgagcagatgaacttggccggcgcctaccgacgtctcggactgcttgtccaccgtggcggccaggcccgcggcgtcgccgagttcaatgacaaggagatcacctcggcgttacgactcccggtcatcggggccattacccacgacccggccggagccgcccaactctccgacggggtcgggcagcggttcgacaagtcacgtctggcccactcactatcaaaggtggcggccagcctcgtcgatgccataaacaagcgccacgctgatgacgaggaggatctgtgatggccagttttgctgataatccgttcgacaagctgcgctcccaggatgcggcaagagcttcggtagagcaggagcctgatgccggattagcgtcggagttgttttcgacgtcgtcggggtgggccagctctcagcaggtgtcccaagctcaaccggtgatgacccgttcggagaacgtggattggccggttgtcgcggagctagccagtacggccactgatgaggttgaggctgagatcagcaggtggagttccactcatgatggggtggcgacgctagacattcgccaggccatcgcggagcctgctattgcctcggcggtgtctacgtatgctgaccgacgccagatcgatgtaggggagacctggcctgatctggtacgccagcgataccgcaaggctgtgtgggatcagctgttcgggatggggcggttgcagccgctgttcgaaatcagcgacgccgaaaacatcatcgtggtgggtaaccatgaggtggttgtcgaccacaacgatggttcccggtcaacgctgccgccggtggccgactcggatgccgagctggaatcccagatcgcccggatggcgaggaatgcgaccccgcggcgagccttcgacgccgatcacaccgatgtgacgatcatgcaccaacagaagttccgtatccacgcgatctcttcggaggtgtcgttgcaaccgtcggtggtcatccgccaacatttgctcacccaaatcagtctgggggacctgtcccagcggggaatgatgccggtggaagtggcccggttcctcgatgaggcggtacaagctggcaagtccatcgtggtcgccggcgagcagggggcaggcaagacgacgtttttacgagcgttgatccacgccattccgatgcgggagcggttcgccacgttggagaccgatcaggagttgttcgctcatctgatgcctggccgggaaaacacgctggtgctgttcgcccgtgatggtaacggcgaggtggatccggcgactggcacccagcacggcgctatcgagatcgcccagctgattcctcctagcctgcgccaggcgttaactagggtcattgtcggtgaggtgcgcggcaatgaggcttcggccatgttccaggctatgcagtcggggactggcactatgagcagtatccactccccgcgagcctctgaggtgccgtcccggctagcccaaatgatttcgatgggcccggtctacgatctggatcaggccatgctgcagatcggtcattcgatcgactacatcgtctttgttcgtaagcgtgacctgcctgatgggagccggctgcgatttgttgagcagatccgttcagtctcgcctggtgattcgacaactcccagtcttggcgaggtgtacacggctgactcgtggacaggccagccgcttacgccactcatgcctggttcggccgccgacgagctgtctcacttcgcccgagacctggattactgcgaggcccactcatgaacactcccgcactaaccagcgccctcatcgtgaccgggttggggctgatcctggccatcgacgggctggtcccggcgccgcctcgacctggtgccccgctgagcccggcccagaggtgggctcggctcacccaccgtcccacaggagcggccgggcgtcgccgggatttgcgttgggggttggctgttctcgtcggcgtcgtgctgtttgtgctcaccgggtgggtggctgcgctggcgttgggccccatcattgtgttgttggcccccaccctgctgggggcggccccaccgaccgatattccgctgatggaggcgttggatcggtgggtgcgtcaggtcgctgcggtgctgccacaggggcgagacatcatcacagcggtgcggatctcacggccgcgggccccgaagctgatcgccgggtcggtggatcaactggtgtcccggttggatggccgtatggagccgagggaggcgttccagcggatggccgacgagctggactcggctgaggctgacgcggtgctggcctcactagcgttggcggccactcatccgcggggagcctcgacaacgttgaaggctattgctggcaacatccaacagcggttgaaagtgctgcggcaggtggaggctgagcggtctaagccgcgtaactcggtgcgccagatcacactggtcacgatcgccatgttcggggggctgctcgtgatcggacggtcgtttctggccccgctggcgacccctcccggtcaggtgctggtggccgtggcggtggtcatgtatgtcatcgcactagtgcagatgtatcggatggcgcggccccgtcgacgcacccggatcatggtcaggaggacccgatgaccattactgctttgtccctgctggccggggccatcgtcactgtcggactgctggtcatcgtggcagcgttccgcccagccccaggccctgacctggttgccgctctggaggtggtgtcgggtcgcacctcaagcgtcgccgagaacgtcgaccagacccggatcgggcggataggtcgcagcgtgacccgcacattccatgtgtcggtgtccccggccatgcgggccgcactgcgactccaaggcacgacccccgaagcgttctacggtcgacgcctgatctgcgcactgatcggggcgatcctgccgtggctgctcaacgcggtagccatcgcggtaggggcgaattccccgaacctactcatcccttcggcgctgtgtgtggcgttagctggcgctggatggatgctgccggcagcacggttgaaggctgcggccgggcccaccaacgatgactcgttcgaagcgctgctggtattcatcgatttggtcgtgctggaacggctcgccaacgaaacctccgtcgacgcgctcaccaatgcggcaaacatgtcggactcgccgctattcgtccagatccgtcaagtcctcaaccgtgcctccctggaaaacgtcgacccgtggaacgggctagaccggctagccgaggacatcaaactgcccgaactcaccgatgtggtctccatcgcccgcctccaaaacgaaggcgcctccctcgtcgacagtttccgggcccgagtcgccgagttgcgcgacgcctacctgctgcgcctgcaacaagaatccaccgccatcacccagcggcttggtttgtggacgatcctgcaagccggctcggtcatgctcatcttgctgggggcggccgccctcacactcatcacagccggataaaccgacatcgtgtcgagcccccatatgggccgcgaacctttcataatgatgcctgtaagcaccacaatattgatcacaacctaacaatgaaggagaaatcatgatgaccgatctcgacctggctaaaaaacagatcacctggctggcggcgcacctgcgttcccggatcgttgacgagcgtggcggtggtagctctaccgtggagacactgatttggattggtgtcatcgtggcgctggtgattggtgtgggcgtcggggtgacggcctatatcaggtcgaagatgcctcactgacgacgatgcgtagcaggttcacaactgatcagcgtggcggtggtagcgcgtcggtggggatgctcctgctgatgcctgcgatcatgctgctggcattcggtgggatcgaggtcgggatgtggtgtcacgcccatcagtcgaccatcgcggcagcccaaagcgccgcggaggctcagcgtgtcgtccatccggtcccggggtcggcacaggaggcagcctcgcagatcactagtcatggcggggtgcgtgatacccggatatcggtcagtgatgacggggccactgtcacggtgaccgtctcaggtcgggccccatcgatgctggggctgcatcttccggctgtgtcgtcgacagcgtcgatgcccaaggagcgcctgtcgtgaggcgaagtgagcgcggtggagcaagtctaagcgtcgaggtgctcatgtgggcgccgatcgcgctggtgatcatcgggtttgttgtgggtatcggccggatgtcgatggcccaggacgcggtgaatggcgcggcgggtgctgcggcccgtgcggcgtcgttggagcgtgatggacagtcggctcagtctgcggcgcagcaggcggcgtcggcgaacctgtcgtccggtgggctggcatgtgcgccgagtgtgagcgtggacacgtcagtgtttgcccgtcctgccgggcaggcgggcacggttcacgccacggtcacgtgtgtcacctcgctgggtcttgggttcgggtcccggacggtgcacgcaacggggtctgccccggtagacacctatcgggaaaggagaggctgagatggcccgtgatgagcgtggtggcggctcggtgtcggtgtggatgctgctcatggtgccggtgattctggtcatggccggcctggtttttgacgggtcccgtcagatatcggcaacccaggcggcccaggacgcggcggttgcggcatcccgcgccggaactgatgcggcagcgacaccgcagcttgctggccacgacggggcggccgtagcagtccaagcggcccgccaggcactatctgctgccgggggggacgggtcggtgcaggaggacgggtcgaccatcacggtgaccacgtctcaaagtcggccgacagtgttcctgtcagcgatcggaatcagccaggtaagggggcatgggcaggcccatgctcagcttgtgggaccgggagaacgcccatgacagtgatacgtcgtatcggtgccctggtggcactgctggtggtgatagccggcttaccggccgggctcgtggccgcaggcgccccgctagtaccctcgggcctgtcatgggcccatgtgcggcatctgttggttaccccagacatgaccgggtcggtgctggtgtggctggtcagcctcatcggctggatcgggtgggcatggttcgccctggccgtcgcagccgaagcggtgacgatgctctcagggcagcggctgcactggcacatgcccggccctcgcctagtgcgccgagtggcagccggtcttctcattgccgcgttcgcggccgcaccggcagccacaagcacggctcacgccgccgaggccacccatgtggcggtcgccgcccaggctggaccggcacacgcggcccccgcccaggacagccccgtcaccacctctcaggccccggacgcctccaccactccgaaaatctggaagacctacacggtgcgggccaacgactacctgtggaagatcgccgagcactactacggtgacggcgcccaattccgtcgtatcgccgaagcctccggtatcgacccgcactcagagctgaaagtcggccagaaactgatcctgccggttcccgagaacacggccgcagttcattcggttaaagcgggggagtatctgtgggagatcgccgagcactactacggtgacggcgcccagtaccataaaatcgctgaagcttccggtatcgatgcccattccgatctagccgtgggccaaaaactcgtcatccccgggcccctccgccacgacgccacgccgccacaccactcggcgtcgacccacgcgaag

SEQ ID NO: 215 - DNA, 2238 bp, Propionibacterium acnes
gacgccggccaccccaactactccgacccacacggtgaccccagctccggcctctgccggccactcgaccagcgacgagcacccactccatacggataccgccgcagcggacaaggccagcaacgaggacgccctgtccccaatccaggtgggtttgaccgccagcgtcggactggtgctggtcgccggactgatcaccaccctcaaccgccgctaccggacccggttcacccgccagccccgcggcaaggccatgaccctgcccagcccggacgcccaaactgccgagatagcgctgcgcagcaccggggcgactgacactctgacgatcacctgcctcgaccaggcgctccgcgcgatcggcgcatggtgccaccactgcgggcacccgctgccacccctgctggccgcccgcgtcgatgacgaccggatcgacctgctgctatcccaggcggcccccgaccatcccgaggcggtggagctggccgccgacggatcggtgtggaccctcaccgccgaccggatcgacgacctgctagcccacaccgatgacaaccaagcggctccgtggccgtctctggtcacactgggacgcgacgacgacggcgcccacatcctcatcgacttggaagccgcaggaaccttgcacctgatcgccgatgacgaccaggtcgacgcggccctcgccgcgatcgccgtggaactggccacctgcgactggtccgacgaagtcaacgtcaccctcgtcggccaggtgtgcccgggcctagaagacgcactagagtctccgaccctgacccgcgccaccgacgtggacaccctcctcaccaccctagaagctcgcgccgacgaccagcgacacatcctcaccgaaggaaaccccctcgccgctcaccgagccgaccccgccatctccgacgggttcgacgccgaagtgatcctcctcgacaccgaactcaccgaagaccaccgcaaccgcctcgccagcctcgtcgaggctcttccccgcgtgtcagtcgccgcggtaacaaccagccccaccagcccagacgaatggtccctcaccctgacaggtgacccactagccgccgacctggctcccctcggctggcacatccacccccaaaccctctcccccgacctgtacaaccgcatggttgaactactcgccaactccgccgccgcagactacgaacccgccagctggtggaaccacgacgccgacgacgagcccaccaccgaccccaccaacgaggaagaatctaccccgagcaggcgagcccgcccgaatatccgcctgaccaccctgaccggcggcatcgacctatccagcgtcgacatcgacgacatcatcgacgaagccaaccaggccctcgacaacaccgaccagaccaccaaccaggttcgcgtcgacaccgaccaacccggcaccgacacccccttccccatcgacgacatcgacccgctgagctccgaccacccggtcctatccatcatcggccaccccgacatcacaggtgccactggaaccgttgggcgctccccgtggcgctgccaacagttggccctctacatcgctgagcatccgggagcatcgggggcgactatcgccgatgatttggggctatcagcgtcgacggtgcgctcgattgctacacacctgcgacactggttgggagccgacgatgccggggtggcttacatgccggcggcgacgcgcggctaccggctcgatgagcggatcgtcacagatgtggacctgatcgacgctgctgtggccggggcaggcattaacaccgctgagacggccacactggtggccattttgaagctgggccgcggacgggtcttcgctggggttcctgactcggaacttcgccagttcagggcgtcgatgtaccacgtggaggcccgcatcgttgatgcggctcttcaggtgacggatcgggctctggaagccggggacttggggctggcccggtgggcgttgacccaagggctactggtgtctcccgatcatgaggacctggtcgccggttgtctgcgcaccgagtaccaggccggcaacatggacaaggtttccgagctggtcgatcacctgtcggctaccgcacgacgcctgggcgtcgatttgagcgccgacaccacccggatcatcgatacggtcacccacgccgacaggagagcgtcatgatctcccctgcactcatctccgtcaggaaggttcctatgcaccat

SEQ ID NO: 216 - DNA, 10907 bp, Propionibacterium acnes
ggcttcctgtgcgccgagcatgagggtgccagaatcctcgccagccgattcccagtcgacgatgacctggtcgccgtcaacgctggattcggcgatggtcacccattgcccgtccatgtcgatgagcatcccggcggccagctctgtggcggcaaccgggtgggctgggctgtagaggaggtcgatgtcgcgggcagggtcgtcgggttcttcggttacctcgggtggggtcgatctggctgtctcggtgtcgtcggccaggtcggctcccaggatgcgttcccattcggggctggttttcttgcccgctgaggccatcgtctcgtcgatctgttcgtcagtgggccacacaaatttctttttggtccaggtcgtggtgtcgggtcgcagctgatccagcagttccaggtcttgcggggagtgggccttgcgggggtcgggggtgtagaagaattggacttccttgggggctgattcgccggataggtaggtgccgcggccgcgtttgccgaacgggatgcccacgccgacgtgttcggagccgaacatcatgcgggctccgtcagcggacaggggtccggtggcggcacgcccggagaagttgtctcggatttcgccgcccaggaactcggcgtcggggcgttgggtccccagatcgacgtggatacggcaggcggctgccatgcgcagcagggagccgatccagccgaaaacggggcattctccgggcatcccagagaccttgatcgttgaccaccagtttttcgcgttgccgtagaactggcggtactcgtcgatgaggaccagcacgcgggtgaagtcggtctcgcgggccccttcttcttcgatgcggcggtagcggtcctccatgagagaccacagccagtggatgagggcgacctggtcggggacggtagtggcgaccatctcgatgttgggccactcccgcaggcccaggtactcgatgcgtttagggtcgatgacgaagacgcgccagttgcggcgggcaccctcgacggcgtcgccgatcatggacaccgtttttccggtacgggtgcggccggccttgagctggtgggccatgacaccggagatgtcccagaaacaggtgttgccgtcctcgtcgacggcctgggggattttctcccagtctggggagtctgggcccggaagggccacgggtcggggcaccatcgagggcagggggtggcggcgggtgacggtgatggtgtcgtgttccaggtcgaagtcgctgcgccactggccgagcatcatcgccgaggtcaccgcggccaggcgcaattggatgttcgggctggacaaatgggcgccacgttggtggtgaatggtgaagccgtccaggttcccccgatcggttttccaggaatcgacggtgaccgccgacccatagatctgagtggctacttctttagcccgttccttgtctcggtccagatcggttttgtcagggtcaggggtcggggcgcggtattgcaggacgaaccggccggccgggatcgttgcggatgtcaccgtgaactctgccggcgaccaggcagccgcggccgcctgggtgagggccattggcatggtctcgacggcagcctcctcgggggggatggtgagggtcaggcgtcgcggatgcgtcttcttgcgattccatgtgactttctgcctcaccggcaccttcgccgccgactgaatggctaggcgagctgattcggcagtttcggtacgccggccagcgcgtagcgcccgtcgtgcgtgaaggctgcccaccacagcacagcccatacacggcagccaccagcgcggatcagcggctgctgcatagcccccggtagctagtaccgcacctgaccagccggccgcgatacttttccacgccggtttcgcgccaccaggaccagcgttatggacggtctgcttcgaggctgcggagggacgagacagcggagtgctggtcatgccgcggcctccttgtggcaggtcatttcacaggcatgccggccagcgatgatgccgtggcgcaccgccccggtagccgcatagaccgcgcacaactcaaacacggggcacccatcgcaggccgccgggttcatgctttctttgtcccacgatggtgggtcatcggtgcacggcacggccaggccatcctgttgagcggcgctgatagcggtgaataggcgcagctgggcgcgaacttggtctggggtcaggttgacggtgcgggctacacgcatggggttccttcctcttcaccagtgaaggttccctagacccggccgatgtgcggagggatttcagtgttttatcgaggtgacaagccagccggtctgcgctgcgggttcaggtaccagggtcagatgcagcatggtgtggtcggctaggggcacggcgaccaggggcccgtcggcgctcgccccggtgagggtgggagttccggccacggtggtggcgggaatctggttgggtttcgcggccatcagggagcccatgagggtcggggcggcgatctggacgagggcgactttgcgggcggcgggatcgcgggtcaaccagccgcgggtgaaggtgagcgcagccgacgtgatatcggggctcagcggggctggtgtggcggcggggtgggccgttgaggagggccatacgcgcggtagcgctggcgacatcgagcgggtcggagtggggtcaggtgtggggcttagggtccgatgtggcgatggggctaccgccccggtggtgggagacgagactggttgggggtggtgttgagggcgtgggatcagggtgaaggcagccaaactggccgggatgaggatgacggccgcgccgacacttcggagcgaggtcatgtgacgatccttcggtagctcgacgggttgccgtagatcttttccacgttgatgccactatgtgggttgtcggcgctaaccatttggcctccaccgatgtagacggccacgtggtgggcagggcttccccagaggatgaggtcgccgactttgagctggtcacgggccaccgcggtgccgactttctgctggtcggcggcggtgcggggaaggctaatgccgatacgccggtacagcgccgaggtcaggcctgagcagtcgtagccgccatcggctttgccgttgccaccccacacgtaggcgtaggagttgttgtcggcgatcgatttggcccatgccacggcttcggccaggttcttcgacacaccggtctcgttagcggccccggtggcacagttgtttgacaggtgccctgtagtagtggatcccactatttgtttggccatggtttcccatttggcgtaggcatcgggcagggctgagccttgcactgcctgagctgcctgcgtcagcggcatcttctgccagtcagcgatgtcgactaaaccgggaatgtggaatccagggccgccggccgatccggggccagcgtaggtgatggtgtggcctttcaagaacgcctcggtggcgtaggcatcattgttgacctgatccagagtcccgtaccagcccggcaggatgcgctgctgaaaggggccggcgtcaccgtcaccgttagccttcgctgaggtagggtcggccccaagatctgattcttgtttggcggtcatgatagcgatgaccgctgcctgggtaggcagtttgtcacgctggaccacagtgacgatggtggtcacgagctgcttctgcctggccgtgaggcctccggcacccacagtgcctccggtgacggtacccacgcaagcatccccgccgacactgccaccgccgccgccagagttgtcgtcgagggccccagagcctactgacagcagcggcacaatgatcacggtcgcgggcaagaccgccaggcccgccagcatcagcactgctgcactcaccacggcgatcacgtgagatgctttcaacgctgcccacctttcgctggtttgagggggcgacgcctgctggtacgcacaggcttggttggtccagtccgccgttggttggcaggcctgggtttgatcggcttgctgggacccggtttgggctccggagtcttaggctccggcttcacatgcctaggcacttcggctgcggtgggaggagtcagcacgtggcgtaccggcttggtgaccttctgggcacccgaaacaaccggcttagacaccaccttggcacctttgaccaccggtgcggctgccttcgcgccggccttcttgactgcacgatgcgctttgatagccccggcctcggcccggccaaccctgctagcagtagcatcgagggctctgtggcccgtcgttgccctcaccggtgcatccttgccctggcgggtctgcttagcgatcgccgacatgccgcctcgcaatgccgaaacatgattgtgggcgtgggcgatcgccgacatgccggccgtcgcgatttttgactggccctgcggggcccctgccccagcacgaatctgctggtaagccgccgacgtgccacgagcacccgccgccattcgcgccaccttcgcagccctagtcactcccgtcgacacgccacccgtggctaccgcagcagcacccgagaccacagtcgaggccatccgccttcgacccaatccggtgagcttgcgaccaccgctgcgcaccatccggcgagcaccccgcccagcccactggccaatcgccgacgccccttcggaacgcttgctgcgcatccaatcgttgatcttgtccctcagccccttctcgcccttgtgacgacgccacatggacatcaagaacccgataatccccacgagctcgagcatgttgacaaccatgaccttgatggcgacatcaccgtcagaggcgaaaaccgacttgatgatgagcatgaccacacccaacatcaccatcgacccgacaatgccgatcatcgagtacaagatcgaacacagatcccggatgagcggatctgtgcggccagggatagcccgcaacacgttgagcatcgacatgaacgccgaccacaccaacttgcacacgtagaaccagcacatgcccgcgaacaccagcaggaccacagccaaacccgccaccgtcgacgagtaaaagaagaaccccaccaaccacgaaccatccgcaatatcgccggcgtaatccgacaacccctcatcacagtcaccaaggtcgtcgcgagcatccgagacgtcatcgtaagggccacccttgagcacctcgatgtacttgtcgtggcacttcgcatcaataatgcggccatagttgagctgctgatgaaccggcgccacgaacgagtccacaatgatcgccgacagcttcggatccttcgagtctcccgtcgaggtcatgtcatcaggaatctcgacctcaccagcggtcgccgtcgcaggatcaaccgaactggtaatcatatgagacagcgccacaccgaactgctgggtgcgagccagcggagtagccaacgtcgtcgtatcgcctgcgaacttcgccaccggggccgccaagaaacccaacgccagcgccgcagcaatcgccgcacgcgcacccgtagcccacgcccctgccgtacgtcccctcatcatcttgacgaccacgcccacaccggcgcacgtcgtcagcaacgtcaacaccgttccaccccagctgtccgctcccagcggggccaaaaccttgtcgtggatgtcgttctgtaaccccaccagcggtccggtaatccacccgacccagctcatcgccacggtccagtccaacaaccggcacaacagggcaatgaccatcaggtacgtgttccaacacatgccaataatggaggcccacatagccttcagcggggccgtaacgccaccatcgtccatcgacatctggtactgaaacaagtgaataccgttggagtcagtcacattgaaaccgtcacccatccagcccagccccggacccgatgccatggcaggcacactgctcagcgccaccaccagaaccagcgtggtgacgatgatacggaaccgccgctccccggccccggggcggcgtggatgacggctcacgctgtctcctggtcgtgctcgggcgggttggagctggcggcttcgcggtggggagcgtaggcaggtctcagtagtcgaatttcaccgacgttgccgtgttggtcggcgtacaggccacaaccggggcctccggggttgagggcaatcttgaccaggtcagcgaactcttcaggggacgttttagggtccacgcccaggaactcgacacctttctgggcgaggttgatgttgtcgcacagcaacacgatgcgatgctgaatgaggttgcggacggtctcgttggggtaatcggcctcggggtcgtgggagccggtgataagccaggcattggctcggcgggattcgcgcacgtactcgtcaatggcgtgggaggcttccggcgaggacgacatgtgatgaaactcgtcaacaatgaaagcggcgtcgcgggcccggtcgctgaagcacaccaggcgagccagacgggcaatgagcgcgtagagggctcggccaaacaccttgtgcgggggcagctgccgaaacagatgttctgacagcatctcctcggcgttaggaagagcgatgccacaagtgccaatgatgaggatgtcggcactcaggtcggcgggaggaaggtccgggtcaaagatggccgaagctagggaggccgagttctcgatgtcagcgaacacggcaatcctgtcagcgatcgcggtggcctcgggaaggtcgcactcctcggccaggtggcgggccaaacgcccacacgaggtgatctggtggtcacgcatgtaggccggtttgaggaccttggccagcgtggtcccggccacaccgatggtctccaagttaagcaaggtcagcaagaacgactgggcgacctgcccggccatctccgggggaaggatgcgcagcgggtccagcgacagcttggggtgggccgtgtcgacgatctggcgtctaaccccgtcgatagagttgacaaaggttacccactcccgctcatcggagttgtcggtggcaataatgcgcccgccccgggccgcgatggctgcgcacagccgcttctcggccatcgtcttgcccgcgcccatcttgccgatgaacgccaccgtgttgcctttctgatcctgagtgtcggcatgcaaatcgaggtaggccagcgactgcaacggggagcctgtgaccacagccaacgggatgccggtggtacggcccaaccggtactcaaccaccgggatagatgcggcgaacgcggaggcgtgagtcagctgacggtaggcgttaagcgaggaggagaaccggccaccgggccgggcagcccacagcaagtcctcctgacggcccacgggacgcacccacgtgaagtcaccgaacaccggatcattgacgaacgctcctgccagctcctcggtggtctcaaagtcaggagacgagacagtgacggtgataagagcctggatctcgacctcacgctcatcggcggccagctcggcgttgtagtcgacgagcacctgagcggaatgctcgatagacatgagggtcgaagcctgggtcatctcaccgccctcgacgttgtcgagctgatcgaccgtttgacggatagcccgctgatttttctgcatcgcagcgtgacgggtccgggccactccccggatcgccacgtcgaccggcacgccagtgtcgtcgatacggcccaaaaactcgtaggcaggccacgtcatcgtgcggggcaccttacccagcacgatatgggactggtagacggtctcgccggtgtcggcaccgattttgaggacgcgacgattccacgcctgagccgtccgggacatgtgggagactcgcttgtcatcctcgctggccagcaggtcggaggtcgcggcctcatcgatgaccaactcccccagcgcggcacgtccaacctcatccatgagggcgattccctcgccaggggcatcatcacgcaaccgggtcgggtggcctgacaggtgctgccgaagccagatctgttcatcaacggtgaccgggcggggttggaacgctgccggcagtttcgcaccgaattccttagcctgacggagggcccactcccgtgcgacacggccaggagcggtggtcatgagtccggcggcttcggtgattttgttgagggcggcggtccaggcggtgtgggtgcgtattttctggtcttggttgagtttgatcgataggaaccacacgcgccggcctagggattcggtttcaggctggtcgagggtggcgtcgatttcgtcggcccacacggggtgttcgctcaggtcgaggccggcggccatggcgtcgacgatttctgtggggtcggtccaggtgagggctccgttgaggcagaactcgtggcgggcgaggtggcggaataggtcgcggtgagctgcggcgacggtgagggaggcgttctcggtgacgggtcgctggaggggagtgagtcgccaggtggcccagatgtcgccggtggaggtccagacgaggttgtcgaagaggaaccgttcggggatggacatcatgactccttttcggcggcggcgaggaaggcttccaggccgctgcggcgtacagcgttcccggtagggtgcaggggttttctgggggtgggttcagatttcgaatgtgggaggggtttgtggatggtatcggtgtcctcggcgagggcttggtcgagcaggcaggtggccggggtgtcggtagtctcgtccagctcgtcgatcatctcgtcgaggaggttgggggtggtggatgcggcccacacaggtgggatagccggtgcgggtcgaggcggtgtggggaggcggagtttggtttggccccagaggggtgtgtgggtcatgccggcgggagtggtggcggcgtgagtggtcacacgccaccagcccgccagccatgccagaggtgaccaggtccagtcgatgcgaccaacaacgaactgggcgagccatccggcagccagcgcgaaaatgaaaccgcggatggtcatgcccccgtcgataattttgaagcccatcattgcggcaggaactacgccgccgacagcgagcacctgatagatcgtgtagggcccgccaggaatccttcgacctgaggaatccttaccgataatgcggggctgctggcgggcctcggtgtgccactgaatatccacgatcagctcttgcccaatccttgcatcatctgtccgaagaattggatcgcgttaccttcgataagccagtgcgccataccacacacaaacagcatggagacgatcttggccaggctcataccgtgtttgaagatgttgaacgcggcaatgcccacgactacgaccatggcgacggctcgcaccgcggactgaccttcacctgccttgatcgtcgtccattcgaagaggttctgcgattccagtggcagcaggaggaattgatcgagcatgagaggttttcctttcaggaagccgaccgggatggtcccggtactgacgggctggacggcacgggtgtgccggccaggggcagaaggcgtgacggctggtcgagggaggcaacctcccagcggcctgcacggctgacaagagtcaggccgtactggctggtccgggtagtggattcgtcgccggtgggctggcatgtcacggtcaccgtgacggtaatcttctgccggtctgagggggtggggacctcgtcaggtcccaccacatgagtggttttcactgatacgcatggggctgggtcaaccgcggtgaaagcggtccctgggctgctccatctcgacaggtcagtattcccggtcagcatggcggttaggaagcctgaagaggcttgggcggccgggtcggcggtgcgaagctccgaggtgtctagggtgggggccgaggccggtgcaggcatggggatctgtccaggtagacgcaaggcgatggccttgccgttggaatcgacgtggaccgggactgaccaggcctgtccgctcccggattggccgcccatggtgaccacggtgacctgccacaggctcggatcagacggggagacggtagcgtcataggcggtgacggtggtgggcgctggaccaggtttgcggggcatgcgcgcatcggtgatcttggccgccaccaggtgttccagattgtccaagtgcccggagtcagaggtcagcagaagagtagtcacctcgaccgcggtggctgaggcgatctgagctgtgcggcggtcgtgatgggtggtgtcagtgctgacagctgtggtgggagcggatgccggggccgccgaacggaccagggcaacggggccgcatgcgactccgcacagcacgagggcaaggaagcctttggtggccatcgatccggtgtggggccagggacccacgttttcctgtgcctgttttttcttggccgaccaacggcgggacttagggttagcggatgcaccttctggggtgcatgctcgtctcaatcgcatcggtcacctccttcactggatgaagggaccaaggaggtgaccgatgtgcggtcgaacccgaaaaagttcaaacttttttctgggtctgcctcaagtacgacagaaggcctgcatcatcacggcgttgtggtagcagatcttgcgtcagcgcaaatgtatgggcctcgtaggagtagctcttaggtgggtcccggtggttgcggccagggcgagggtgtcgggtatgtgtagcgctagtcccgggttcgtggtgtgagggcttttgggtgctgacatgcactacccattgctagacgctgtgctgtggcatggctggacgtctagcagacgggttgacatcacctttaggctggcagcgcccgaggccgcaggccagaggaagcggacagcctaacgattgacgtccccctctcctttccccaacctcctgga

SEQ ID NO: 217 - DNA, 9469 bp, Propionibacterium acnes
tgtgtgggatcagctgtgccgctcccccgacatggcagacagcaccgttgcatgagaactgactgacactgtggcgccgcggaggtctcccgcggcgtccgctggggcgagtgcatgcctgtcagctcatcttttatcgtcatgtttccccttgtcagagcggtctttgcaaagtgacaacgtcaggggtcttgacgacaacatcctcgacaacatcgtggcggtggtctgtgtctcgtcagttcaacgcaccggggaaagaggcaccgctgatgttcaccaccacaaacaccctcaacgatgagtgggaccagattcgcgccactgagatcgattggcatgactgccctgaactgatgcactgcatcgacgttgatgatgtgttggccgtcattcctgccgcccccgacgccatcttgggctacctcattgcccgggctcagggcggtgacgagttggccacccgcactatcatccaagcgttcacaggcaagcttatcttgatggccacggccaccaaggtgcgccgtactaatgacggcttcaatgatctgttggcgggtctgtgggagacgatcatcacgtacccgttggatcgtcgccctgacaagatcgctgcgaacctcatcctcgacacgttgcaccgggttacccggttctggcgtgctgattcccccgatgaggaagaggctcacggtctggtgcccttccctgacactctcatcgccccagagcccgatgaggacgtcacagctagccaggccatcgccttggcggtggaccgcaactggattaccgaggacctagcccgcctcatgagccatatttactgtgacggtatgactggagctgatgcgggtcgtctgcatggctgcgctccagctacggtgcgatctcgatgccgtgatggtcgggccgtgttgcagcgcaacgccgagacgatcctggccgtctgctgatccctctcttgctcatgcctgccgccaccctacccctacctgctagaaacatagccatgtctccagcaacgcatctagcatatcttctagcaattgatctagctatgtatatagctgatgatctagctatcatatagctgtgtctccagcccaaaggacagcccaatggcatgcttgccacaggaaggtgcgtcagcctcccgaaatactggaaggagctttaccgtgcaggacatgacctcgaccagaccgattgaccgatccccgttcgaccgcactattgcggtgtggaaccacaaaggcggcacgttcaagacgtccgtcgtggcgaacctgggatacctgttcgccgccggtggcaacaaggtgctgctggtcgacatggacccccaggccaatctcgacattgacttcggtatacccgcgggagaacgtgaacggggcatgggattagccgaggcgctacgtgaggggacggcccttcccccaccgcagcatctcagcgaaaaccttcacctggtcagtggcggcgctgctctcaacgagttcaccgaccccgcatccttagcggccatcctcgaccgagtcaccaccgcacgctacgacctgctagctcaggcccttgccccgctggcctgggactatgacctcatcttcatcgactccgggccggcacaaactctgctgtcccagaccatccttggagtagcccgctggctggtagtgcccacccgcaccgataacgcctcaatcactggcctcgtcgacgttcaagacgccatcgacggggttgcctcctgcaaccctgaccttcaactactcggcgttgtcctagccggcgtgggggcccgggccacccggatcgccgcagataaacgccacgccatcgacacagtgctgggggcaggaaccgttttcgatgcggtcatccactactccgagaaggtgtccgtgctcgcacgccagcagggcaagaccgtcgccgagctagccaacgagtaccacaacacccagcccgcctacacctacctagctaaaggccagaacatccccaacgtcgccaaggcagccgtcagcatcgaaactgattatctgaggctggccaccgagatcagcgaccgcatgttcaccagcgacgagcaggagcctgatcatgactgacgatccgactccatccgagcagaacaaccccaccagcgacgacatgcgcttggccgaagaatgggccaacagcggccgcacagtgggagccctgccgcgccgtcaacggcctcagcgacccacaccccgcaccaccagccaaccccctgtctcgtcccctgacacaccggctccgaaaaaaccccagaagacccccaccagccagcctggccgtcaacggatcaacgtcaccgtctacgttgtgcccgaactccatgagcggctgcgctcccgatcggcggcgacgggggtgacggtctcggatctggtggtgcatgcgttagcgttcgtcgccgatcatgcgggggaggcgatcgccgatgatctgcgcgtcgagacgggccccggcatgggggccggactgttcgatgtgaccccatcgcggccagtaggggtcgccaaaacccagctgggggtgcgaatgacccgccacaacaaggatggtttggaccagctgacccggacgagtggagcccgtgaccgcagccatcttgtgtctgtcgccgtgcgcgactatctcgactccaaccctgtaaagaaaggccgacatgtccgctgatgaaactcctgccgcccggggtgggcgacgctttgatacgaccgtcaagcccaggcgccgtcccatgcttatcgccgccggtatcgccatcgtgatagtcggcgcgctcctcatcactcagttgattcgctccgcccaaaccgagcatcgcgtgctggaagtccacgccgatgtggctcgcggcgaggtcatccgtgacaccgatctggtatcggtgactgtcggccaggtcgacaacgtatcaacggttcccgcagaccagctcgactcactggtcggcaaacgcgccacggcagatcttcgagccggatcactcttgcctgctggggctatcggcccggccgatgtcgttccagctccgggcaagtcgctggtcgggctgaagctagccgccggacagatccctatcggagaccttgctgccgggacgaagctgcgcctgatccagacgtcggcacccagcggctcatccaccaccactgatagcagcaccaataccgatggccagtcgtgggaggcaacaatggcgaccggcaccaaaaagaccgagcaggtcaccttgatcaacgccgaagtgaactcgcgtgatgccgcccggatcgcccaactgacgtcacagggccgtatcgccgtagtgaaggatccgatccgatgagcaccattgttttgaccagcgtctcgggagccccaggggtcaccacgacagcgatcgggctgggcagggtctggccacaatcgagcctggtcgtcgaggatgacacccaccacgccatgctggcgggctacctgcgagcctcccagcacgccgaaccgaacctggccgcagtggcgaacctgacgtcgactccaaccaacgcccaaacggtgtgggaatctatcgccagacccctacccaccgatgacccagtcggcgggctgcgacgcaaaggcatcctcggcccgcccacgccgtggtctcgcgcaggcatcgacccccgatggggattcatgctggccctgtggcggcaactggaggaggctggcatcgacaccatcatcgatttgggtcgcctagccacaccactgacctcaacgccacacctgatcgccgcacccatcgtcgaggacgccgacatgatcttggtgatgatcgaggcgacactacgcgacatcgccggcgcccgcacgatggtggagggactcgctgagcagatgaacttggccggcgcctaccgacgtctcggactgcttgtccaccgtggcggccaggcccgcggcgtcgccgagttcaatgacaaggagatcacctcggcgttacgactcccggtcatcggggccattacccacgacccggccggagccgcccaactctccgacggggtcgggcagcggttcgacaagtcacgtctggcccactcactatcaaaggtggcggccagcctcgtcgatgccataaacaagcgccacgctgatgacgaggaggatctgtgatggccagttttgctgataatccgttcgacaagctgcgctcccaggatgcggcaagagcttcggtagagcaggagcctgatgccggattagcgtcggagttgttttcgacgtcgtcggggtgggccagctctcagcaggtgtcccaagctcaaccggtgatgacccgttcggagaacgtggattggccggttgtcgcggagctagccagtacggccactgatgaggttgaggctgagatcagcaggtggagttccactcatgatggggtggcgacgctagacattcgccaggccatcgcggagcctgctattgcctcggcggtgtctacgtatgctgaccgacgccagatcgatgtaggggagacctggcctgatctggtacgccagcgataccgcaaggctgtgtgggatcagctgttcgggatggggcggttgcagccgctgttcgaaatcagcgacgccgaaaacatcatcgtggtgggtaaccatgaggtggttgtcgaccacaacgatggttcccggtcaacgctgccgccggtggccgactcggatgccgagctggaatcccagatcgcccggatggcgaggaatgcgaccccgcggcgagccttcgacgccgatcacaccgatgtgacgatcatgcaccaacagaagttccgtatccacgcgatctcttcggaggtgtcgttgcaaccgtcggtggtcatccgccaacatttgctcacccaaatcagtctgggggacctgtcccagcggggaatgatgccggtggaagtggcccggttcctcgatgaggcggtacaagctggcaagtccatcgtggtcgccggcgagcagggggcaggcaagacgacgtttttacgagcgttgatccacgccattccgatgcgggagcggttcgccacgttggagaccgatcaggagttgttcgctcatctgatgcctggccgggaaaacacgctggtgctgttcgcccgtgatggtaacggcgaggtggatccggcgactggcacccagcacggcgctatcgagatcgcccagctgattcctcctagcctgcgccaggcgttaactagggtcattgtcggtgaggtgcgcggcaatgaggcttcggccatgttccaggctatgcagtcggggactggcactatgagcagtatccactccccgcgagcctctgaggtgccgtcccggctagcccaaatgatttcgatgggcccggtctacgatctggatcaggccatgctgcagatcggtcattcgatcgactacatcgtctttgttcgtaagcgtgacctgcctgatgggagccggctgcgatttgttgagcagatccgttcagtctcgcctggtgattcgacaactcccagtcttggcgaggtgtacacggctgactcgtggacaggccagccgcttacgccactcatgcctggttcggccgccgacgagctgtctcacttcgcccgagacctggattactgcgaggcccactcatgaacactcccgcactaaccagcgccctcatcgtgaccgggttggggctgatcctggccatcgacgggctggtcccggcgccgcctcgacctggtgccccgctgagcccggcccagaggtgggctcggctcacccaccgtcccacaggagcggccgggcgtcgccgggatttgcgttgggggttggctgttctcgtcggcgtcgtgctgtttgtgctcaccgggtgggtggctgcgctggcgttgggccccatcattgtgttgttggcccccaccctgctgggggcggccccaccgaccgatattccgctgatggaggcgttggatcggtgggtgcgtcaggtcgctgcggtgctgccacaggggcgagacatcatcacagcggtgcggatctcacggccgcgggccccgaagctgatcgccgggtcggtggatcaactggtgtcccggttggatggccgtatggagccgagggaggcgttccagcggatggccgacgagctggactcggctgaggctgacgcggtgctggcctcactagcgttggcggccactcatccgcggggagcctcgacaacgttgaaggctattgctggcaacatccaacagcggttgaaagtgctgcggcaggtggaggctgagcggtctaagccgcgtaactcggtgcgccagatcacactggtcacgatcgccatgttcggggggctgctcgtgatcggacggtcgtttctggccccgctggcgacccctcccggtcaggtgctggtggccgtggcggtggtcatgtatgtcatcgcactagtgcagatgtatcggatggcgcggccccgtcgacgcacccggatcatggtcaggaggacccgatgaccattactgctttgtccctgctggccggggccatcgtcactgtcggactgctggtcatcgtggcagcgttccgcccagccccaggccctgacctggttgccgctctggaggtggtgtcgggtcgcacctcaagcgtcgccgagaacgtcgaccagacccggatcgggcggataggtcgcagcgtgacccgcacattccatgtgtcggtgtccccggccatgcgggccgcactgcgactccaaggcacgacccccgaagcgttctacggtcgacgcctgatctgcgcactgatcggggcgatcctgccgtggctgctcaacgcggtagccatcgcggtaggggcgaattccccgaacctactcatcccttcggcgctgtgtgtggcgttagctggcgctggatggatgctgccggcagcacggttgaaggctgcggccgggcccaccaacgatgactcgttcgaagcgctgctggtattcatcgatttggtcgtgctggaacggctcgccaacgaaacctccgtcgacgcgctcaccaatgcggcaaacatgtcggactcgccgctattcgtccagatccgtcaagtcctcaaccgtgcctccctggaaaacgtcgacccgtggaacgggctagaccggctagccgaggacatcaaactgcccgaactcaccgatgtggtctccatcgcccgcctccaaaacgaaggcgcctccctcgtcgacagtttccgggcccgagtcgccgagttgcgcgacgcctacctgctgcgcctgcaacaagaatccaccgccatcacccagcggcttggtttgtggacgatcctgcaagccggctcggtcatgctcatcttgctgggggcggccgccctcacactcatcacagccggataaaccgacatcgtgtcgagcccccatatgggccgcgaacctttcataatgatgcctgtaagcaccacaatattgatcacaacctaacaatgaaggagaaatcatgatgaccgatctcgacctggctaaaaaacagatcacctggctggcggcgcacctgcgttcccggatcgttgacgagcgtggcggtggtagctctaccgtggagacactgatttggattggtgtcatcgtggcgctggtgattggtgtgggcgtcggggtgacggcctatatcaggtcgaagatgcctcactgacgacgatgcgtagcaggttcacaactgatcagcgtggcggtggtagcgcgtcggtggggatgctcctgctgatgcctgcgatcatgctgctggcattcggtgggatcgaggtcgggatgtggtgtcacgcccatcagtcgaccatcgcggcagcccaaagcgccgcggaggctcagcgtgtcgtccatccggtcccggggtcggcacaggaggcagcctcgcagatcactagtcatggcggggtgcgtgatacccggatatcggtcagtgatgacggggccactgtcacggtgaccgtctcaggtcgggccccatcgatgctggggctgcatcttccggctgtgtcgtcgacagcgtcgatgcccaaggagcgcctgtcgtgaggcgaagtgagcgcggtggagcaagtctaagcgtcgaggtgctcatgtgggcgccgatcgcgctggtgatcatcgggtttgttgtgggtatcggccggatgtcgatggcccaggacgcggtgaatggcgcggcgggtgctgcggcccgtgcggcgtcgttggagcgtgatggacagtcggctcagtctgcggcgcagcaggcggcgtcggcgaacctgtcgtccggtgggctggcatgtgcgccgagtgtgagcgtggacacgtcagtgtttgcccgtcctgccgggcaggcgggcacggttcacgccacggtcacgtgtgtcacctcgctgggtcttgggttcgggtcccggacggtgcacgcaacggggtctgccccggtagacacctatcgggaaaggagaggctgagatggcccgtgatgagcgtggtggcggctcggtgtcggtgtggatgctgctcatggtgccggtgattctggtcatggccggcctggtttttgacgggtcccgtcagatatcggcaacccaggcggcccaggacgcggcggttgcggcatcccgcgccggaactgatgcggcagcgacaccgcagcttgctggccacgacggggcggccgtagcagtccaagcggcccgccaggcactatctgctgccggggtggacgggtcggtgcaggaggacgggtcgaccatcacggtgaccacgtctcaaagtcggccgacagtgttcctgtcagcgatcggaatcagccaggtaagggggcatgggcaggcccatgctcagcttgtgggaccgggagaacgcccatgacagtgatacgtcgtatcggtgccctggtggcactgctggtggtgatagccggcttaccggccgggctcgtggccgcaggcgccccgctagtaccctcgggcctgtcatgggcccatgtgcggcatctgttggttaccccagacatgaccgggtcggtgctggtgtggctggtcagcctcatcggctggatcgggtgggcatggttcgccctggccgtcgcagccgaagcggtgacgatgctctcagggcagcggctgcactggcacatgcccggccctcgcctagtgcgccgagtggcagccggtcttctcattgccgcgttcgcggccgcaccggcagccacaagcacggctcacgccgccgaggccacccatgtggcggtcgccgcccaggctggaccggcacacgcggcccccgcccaggacagccccgccaccacctctcaggccccggacgcctccaccactccgaaaatctggaagacctacacggtgcgggccaacgactacctgtggaagatcgccgagcactactacggtga

SEQ ID NO: 218 - DNA, 2098 bp, Propionibacterium acnes
ttggtattggtaggcgatggtgtcaccggttttgttgcggatgacgtcgaagccttcgatgtcggaggggatgtcgtcggcgtcgtagacgacggtggtggtgacggggttggaggccgacatttggccgatggtcacgcgcagcatgtttttcaacgcggaggtgaggattgtcgtggcggtggggtttttgtctgcccagcgtttctcggcgatgtcgatcatgtcttggatggttttgacccatcctcggatgggatcgactttggtcagtttgatcccttcgaggaactcgatgggctgggtgatgggcccatccggtccggcttcggtgtcccagccttcgtcgatggctagtttcagttcggcggtatcgacccatgtttcgtgggtggtgccgggcacgttgggccaaaaccatcctgctcgtcctttggtgcgtttgaccggtagtaggccgatgtcgtcccaccaggatggcacggtgaagcggatgtggtagcgggccgggtgccaggggttgttggtgaacaggtcgcgggcttcggtggcgctgagcagagtggcgggtgcggcaccgatctctccggtcactgatccggcatacatgaatcggccgtcgatgtacacgaagttagggatagggccggcaggcacggtggggcgccagcccttttcgcggtcctcggggttgccgtcgtcgacgcatagttcgtagcggtgctgaggggaggtgtgttggatgagtgcgcccagttcggggtccatcggctccatgcgataggactcgggggtccgtagcttccagaggttgattccttctgctccggggcggtccatgagggcccagtcgcggtcgattctggtggcgatgatgtgggtcagttctcgccatgcccagcgggcctggattggggtgagggtctggccagggaaccattcatcagcgaccagaatgtcgaggttgcggtcggtttctttgtgggtgaaccggcctcgggcgggccgcccggacagcatgaacaggccccgcacgtgccagtcctggttgaactcgcgggtgtgagcgggggtgtcaggcagcagccaggattgaggctggtcggggatgttaccgcagacgatcaggcgtcgggcgttgtggtgtagcgcggttgttagcaggtctgacagggtcgcgtgcttggtgcgtcgtccccccagcactggcaggatctcgtttccggccgcgtcgactccccgggcggtgtcgatgtctagccacactgtttcggggtcggggggccgatgtggggcgggacggcgctgctcctggtcgtctctcatggtttcctcctttgggccagggagcggccggcgtcgagggcgttcatgcgctcgcgttgttcttcgcgtagttggtagacccggcctcgtgacactcctgctgcctcggcgatggtggtggccggcaggtggccgatggcggcagcgtcggcaaggacgtcacgccaggccaggtcaatggttcccagctgggctagagcttcgtcgcggcggcgggtggcatcagccactacggaggcccaccctgtggggtggatggtcttgacgacgattcggttgtggcggatggggccccatgcatcagcggggacttgccagccgtgattggcggcggactcggtgatcttgaggcgtcgctcaggtgcgcgggtgcgggcagtgacgtcggtgttccaggtctggactggtacccacgtcccctctcggatgcgttcgatgacgcacgtggtgacctcgtcggtgactgtgatgaccagacgataatctttcccgtctggggtggttcggtagctgggcatgtcaccctcccctatctgtcaaatgagctagacacagtgtctatttaatttgacgcaaagtcaagtgtgctagacgcctttgtgtggatccgcccgcccagacaggcactcacgtctcatgacccgccgcgacgtcttaacgaaaccaaaccgcttatagaaccgctccgcagcgggcccggagggcttcagttcgagggtgagaccttgctggtcggcccattggcagacttgtgtgaggatctgtgagccgt

SEQ ID NO: 219 - DNA, 1726 bp, Propionibacterium acnes
cctcgctgactacctgcccgcctgatcccaccccaatccactcgggcgcctgtcagtgccccctcttctgggtggtggtccggggcgtcaccgccccggaccagttgggtagtcatctcagttgaaataagcgattagtgatacgcccctcctgctttccggtgctgtcatgagcgtctgacaacagcgacacctcggggcagccgacggacagtcctctggctgccgctctgatcccatgcccacggcacgaaggtgtcggacagctcggtctcgtcatgtgcccaaatagcgtcgtgggcctgtcgccaagcttctcgggagccccacacgggcacgaccgggccacaccggtgtcctggtctccagtgtcgcgacactgtcgatttcggtacgtgcaatgcggcggcggtttgacggatcgacatcccagactcccgcgcgtcccagatcgccatgtggagagtatttgcctccagtgcggccgccacacttgcacgctctcgcgcacgctcgaatgcccgcctagtgctctcaaatgtcgtcacgacgcctccccctgaaaatactcagggtgtcccacggtgggacaccctgagtatttcataccccaactcgcctcaccacacgtcgacctcgacaccgactagccgacccctatcggcgacattgccatactgctgacccgcctggtcctctagccacgacaacgcatcccgaaacagcccgacgtcttccaaagctaaaccgcagtcgtagccgcccttgtcccccaaccgcacaatctggcgctcccgacggccaccttcatcgacttcgatccatagtttcgcgtgcatccgctggccgcggccttctgacaggatctcggtgagcagatcggaggctcgcatcctcgttaccgcgagggaattggagtgtgtgggaggaacgacgatgggggaggttggtgacctcgtgacgcagcaggttgcgcttgtgcatctgccgttcgaggcgctcgggctgactcgttgacggggttgtgccgtggcgccgcttcctcggcggggtctcgatccgttgctcttccggcggttcggcgtcaggttgtggtgcgcgatctcccctaggacgggggggctcaccacctatatccgagggacgatgagacggccttccacgcttgctgcgcactttcgcagcccgccccttgcggtcacatcgacgcggcggcggggtaacctcctcgccccgctccaactgtgttaacgccgccaccaggttggtgcccggtttcagcccttttagcacgaaccgcaccaggcgggggtctcggccgattcgtcgggcaatctcggcttggctccacccctcggccaacagggtgcgcaccaagtcttgggcccggttatcacgctcagtcactggtcgccccctcggggagtcctgcctgctcggcctgctctgatagagcagcccgctccgatccggtctgaggcgctttcaggggcccgggcaagacacctttgacacgcagccgcccgtccttgccgtcatcgccgcccccctgggccacagggagcgcccaggggggcacgttgctggtgtagatggcgtcgccgtggatggccagcagggtgcgggagttcatgcgtagtgctcctcccttggttgtggcgttttttccggtggtggggtcggcgatgggtgtgttgagggtgcgtacgcgggacagggcccagat

SEQ ID NO: 220 - DNA, 619 bp, Propionibacterium acnes
ggcggtggctcgaccaggtcgccgacaaccccggcttcctcgacacccttatcgaggccgcccgcatcaccgatggatggcatcacgcgacgcctccgcacattcaggccccttaccggacccttcatcagtgaacggaggtacaacgacatgaccagcgacattgacattgaccggacccacaaacccgacgaccgcgccgaggctcctctttaccggtcctgggccaggagactcgtgcacgtctccgggatgccctggcgtatcgtcgccgccttggccggggtctcccccacctccatgcaccggcttctattcggccgcaacggtcgacccgtggaatggatcggcatcaatgatgctcgcgccctgatggatatcggcatcgatgatctcgcctcagcgtccaccgaccgtatcccggcccgcgaatcccgcgagctgttggtagccctgcacaccctcggctggaccaacgcgcacttgagccgctggctgaccagttccgacctcgacctggccaccacccccaaggccctctacgtcactcgactatccgccgcccgcatccaggccacctacgacatgctcatcagccagcccgtccgccgctgcggcc

SEQ ID NO: 221 - DNA, 8774 bp, Propionibacterium acnes
gaaggttccctagacccggccgatgtgcggagggatttcagtgttttatcgaggtgaccagccagccggtctgcgctgcgggttcaggtaccagggtcagatgcaccacggtgtggtcggctaggggcacggcgaccaggggcccgtcggcgctcgccccggtgagggtgggagttccggccacggtggtggcgggaatctggttgggtttcgcggccatcagggagcccatgagggtcggggcggcgatctggacgagggcgactttgcgggcggcgggatcgcgggtcaaccagccgcgggtgaaggtgagcgcagccgacgtgatatcggggctcagcggggctggtgtggcggcggggtgggccgttgaggagggccatacgcgcggtagcgctggcgacatcgagcgggtcggagtggggtcaggtgtggggcttagggtccgatgtggcgatggggctaccgccccggtggtgggagacgagactggttgggggtggtgttgagggcgtgggatcagggtgaaggcagccaaactggccgggatgaggatgacggccgcgccgacacttcggagcgaggtcatgtgacgatccttcggtagctcgacgggttgccgtagatcttttccacgttgatgccactatgtgggttgtcggcgctaaccatttggcctccaccgatgtagacggccacgtggtgggcagggcttccccagaggatgaggtcgccgactttgagctggtcacgggccacagcagtgccgactttctgctggtcggcggcggtgcggggaaggctaatgccgatacgccggtacagcgccgaggtcaggcctgagcagtcgtagccgccatcggctttgccgttaccaccccacacgtaggcgtaggagttgttgtcggcgatcgatttggcccatgccacggcttcggccaggttcttcgacacaccggtctcgttagcggccccggtggcacagttgtttgacaggtgccctgtagtagtggatcccactatttgtttggccatggtttcccatttggcgtaggcatcgggcagggctgagccttgcactgcctgagctgcctgcgtcagcggcatcttctgccagtcagcgatgtcgactaaaccgggaatgtggaatccagggccgccggccgatccggggccagcgtaggtgatggtgtggcctttcaagaacgcctcggtggcgtaggcatcattgttgacctgatccagagtcccgtaccagcccggcaggatgcgctgctgaaaggggccggcgtcaccgtcaccgttagccttcgctgaggtagggtcggccccaagatctgattcttgtttggcggtcatgatagcgatgaccgctgcctgggtaggcagtttgtcacgctggaccacagtgacgatggtggtcacgagctgcttctgcctggccgtgaggcctccggcacccacagtgcctccggtgacggtacccacgcaagcatccccgccgacactgccaccgccgccgccagagttgtcgtcgagggccccagagcctactgacagcagcggcacaatgatcacggtcgctggcaagaccgccaggcccgccagcatcagcactgctgcactcaccacggcgatcacgtgagatgctttcaacgctgcccacctctcgctggtttgagggggcgacgcctgctggtacgcacaggcttggttgatccagtccgccgttgattggcaggcctgggtttgatcggcttgctgggacccggtttgggctccggagtcttaggctccggcttcacatgcctaggcacttcggctgcggtgggaggagtcagcacgtggcgtaccggcttggtgaccttctgggcacccgaaacaaccggcttagacaccaccttggcacctttgaccaccggtgcggctgccttcgcgccggccttcttgactgcacgatgcgctttgatagccccggcctcggcccggccaaccctactagcagtagcatcgagggctctgtggcccgtcgttgccctcaccggtgcatccttgccctggcgggtctgcttcgcgatcgccgacatgccgcctcgcaatgccgaaacatgattgtgggcgtgggcgatcgccgacatgccggccgtcgcgatttttgactggccctgcggggcccctgccccagcacgaatctgccggtaagccgccgacgtgccacgagcacccgccgccattcgcgccaccttcgcagccctagtcactcccgtcgacacgccacccgtggctaccgcagcagcacccgagaccacagtcgaggccatccgccttcgacccgatccggtgagcttgcgaccaccactgcgcaccatccggcgagcaccccgcccagcccactggccgatcaccgagcccctttcggaacgcttgctgcgcatccaatcgttgatcttgtccctcagccccttctcgcccttgtgacgacgccacatggacatcaagaacccgataatccccacgagctcgagcatgttgacaaccatgaccttgatggcgacatcaccgtcagaggcgaaaaccgacttgatgatgagcatgaccacacccaacatcaccatcgacccgacaatgccgatcatcgagtacaagatcgaacacagatcccggatgagcggatctgtgcggccagggatagcccgcaacacgttgagcatcgacataaacgccgaccacaccaacttgcacacgtagaaccagcacatgcccgcgaacaccagcaggaccacagccaaacccgccaccgtcgacgagtaaaagaagaaacccaccaaccacgaaccatccgcaatatcgccggcgtaatccgacaacccctcatcacagtcaccaaggtcgtcgcgagcatccgagacgtcatcgtaagggccacccttgagcacctcgatgtacttgtcgtggcacttcgcatcaataatccggccatagttgagctgctgatgaaccggcgccacgaacgagtccacaatgatcgccgacagcttcggatccttcgagtctcccgtcgaggtcatgtcatcaggaatctcgacctcaccagcggtcgccgtcgcaggatcaaccgaactagtaatcatccgagacagcgccacaccgaactgctgggtgcgagccaacggagtagccaacgtcgtcgtatcgcctgcgaacttcgccaccggggccgccaagaaacccaacgccagcgccgcagcaatcgccgcacgcgcacccgtagcccacgccccagccgtacgtcccctcatcatcttgacgaccacgcccacaccggcgcacgtcgtcagcaacgtcaacaccgttccaccccagctgtccgctcccagcggggccaaaaccttgtcgtggatatcgttctgcaaccccaccagcgggccggtaatccacccgacccagctcatcgccacggtccagtccaacaaccggcacagcaacgcaatgaccatcaggtacgtgttccaacacataccaataatggaggcccacatagccttcaacggggccgtaacgccaccatcgtccatcgacatctggtactgaaacaagtgaataccgttggagtcagtcacattgaaaccgtcacccatccagcccagccccgggcccgacgccatagcaggcacactgctcagcgccaccaccaaaaccagcgtggtgacgatgatacggaaccaccgctccccggccccggggcggcgtggatgacggctcacgctgtctcccggtcgtgctcgggcgggttggagctggcggcttcgcggtggggagcgtaggcaggtctcagtagtcgaatttcaccgacgttgccgtgctgatcggcgtacaggccacaaccggggcctccggggttgagggcaatcttgaccaggtcagcgaactcttcaggggacgttttagggtccacgcccaggaactcgacacctttctgggcgaggttgatgttgtcgcacagcaacacgatgcgatgctgaatgaggttgcggacggtctcgttggggtaatcggcctcggggtcgtgggagccagtaatgagccaggcgttggctcggcgggattcgcgcacgtactcatcgatggcgtgggaggcttccggcgaggacgacatatggtggaactcgtcaacgatgaaagcggcgtcgcgggcccggtcgctgaagcacaccaggcgagccagacgggcaataagcgcgtagagggctcggccaaacaccttgtgcgggggcagctgccgaaacaaatgttctgacagcatctcctcggcgttaggaagagcgatgccacaagtgccaatgatgaggatgtcggcactcaggtcggcgggaggaaggtccgggtcaaagatggccgaagctagggaggccgagttctcgatgtcagcgaacacggcaatcctgtcagcgatcgcggtggcctcgggaaggtcgcactcctcggccaggtggcgggccaaacgcccacacgaggtgatctggtggtcacgcatgtaggccggtttgaggaccttggccagcgtggtcccggccacaccgatggtctccaagttaagcaaggtcagcaagaacgactgggcgacctgcccggccatctccgggggaaggatgcgcagcgggtccagcgacagcttggggtgggccgtgtcgacgatctggcgtctaaccccgtcgatagagttgacaaaggttacccactcccgctcatcggagttgtcggtggcaataatgcgcccgccccgggccgcgatggctgcgcacagccgcttctcggccatcgtcttgcccgcgcccatcttgccgatgaacgccaccgtgttgcctttctgatcctgagtgtcggcatgcaaatcgaggtaggccagcgactgcaacggggagcctgtgaccacagccaacgggatgccggtggtacggcccaaccggtactcaaccaccgggatagatgcggcgaacgcggaggcgtgagtcagctgacggtaggcgttaagcgaggaggagaaccggccaccgggccgggcagcccacagcaagtcctcctgacggcccacgggacgcacccacgtgaagtcaccgaacaccggatcattgacgaacgctcctgccagctcctcggtggtctcaaagtcaggagacgagacagtgacggtgataagagcctggatctcgacctcacgctcatcggcggccagctcggcgttgtagtcgacgagcacctgagcggaatgctcgatagacatgagggtcgaagcctgggtcatctcaccgccctcaacattgtcgagctgatcgacggtttggcggatggcccgctgatttttctgcatcgcagcgtgacgggtccgggccactccccggatcgccacgtcgaccggcacgccagtgtcgtcgatacggcccaagaactcgtaggcaggccacgtcatcgtgcggggcaccttacccagcacgatatgggactggtagacggtctcgccggtgtcggcaccgattttgaggacgcgacgattccacgcctgagccgtccgggacatgtgggagactcgcttgtcatcctcgctggccagcaggtcggaggtcgcggcctcatcgatgaccaactcccccagcgcggcacgtccaacctcatccatgagggcgattccctcgccaggggcatcatcacgcaaccgggtcgggtggcctgacaggtgctgccgaagccagatctgttcatcaacggtgaccgggcggggttggaacgctgccggcagtttcgcaccgaattccttagcctgacggagggcccactcccgtgcgacacggccaggagcggtggtcatgagtccggcgacttcggtgattttgttgagggcggcggtccaggcggtgtgggtgcgtattttctggtcttggttgagtttgatcgataggaaccacacgcgccggcctagggatgcggtttcaggctggtcgagggtggcgtcgatttcgtcggcccacacggggtgttcgctcaggtcgaggccggcggccatggcgtcgacgatttctgtggggtcggtccaggtgagggccccgttgaggcagaactcgtggcgggcgaggtggcggaataggtcgcggtgagctgcggcgacggtgagggaggcgttctcggtgacgggtcgctggaggggagtaagtcgccaagtggcccagatgtcgccggtggaggtccagacgaggttgtcgaagaggaaccgttcggggatggacatcatgactccttttcggcggcggcgaggaaggcttccaggccgctgcggcgtacagcgttcccagtagggtgcaggggttttctgggggtgggttcagatttcgaatgtgggaagagtttgtggatggtatcggtgtcctcggcgagggcttggtcgagcaggcaggtggccggggtgtcggtcatctcgtccagctcgtcgatcatctcgtcgaggaggttgggggtggtggatgcggcccacacaggtgggatagccggtgcgggtcgaggcggtgtggggaggcggagtttggtttggccccagaggggtgtgtgggtcatgccggcgggagtggtggcggcgtgagtggtcacacgccaccagcccgacagccatgccagaggtgaccaggtccagtcgatgcgaccaacaacgaactgggcgagccatccggcagccagcgcgaaaatgaaaccgcggatggtcatgcccccgtcgataattttgaagcccatcatcgcggcaggaactacaccgccgacagcgagcacctgatagatcgtgtagggcccgccaggaatccttcgacctgaggaatccttgccgataatgcggggctgctggcgggcctcggtgtgccactgaatatccacgatcagctcttgcccaatccttgcatcatctgtccgaagaattggatcgcgttaccttcgataagccagtgcgccataccacacacaaacagcatggagacgatcttggccaggctcataccgtgtttgaagatgttgaacgcggcaatgcccacgactacgaccatggcgacggctcgcaccgcggactgaccttcacctgccttgatcgtcgtccattcgaagaggttctgcgattccagtggcagcaggaggaattgatcgagcatgagaggttttcctttcaggaagccgaccgggatggtcccggtactgacgggctggacggcacgggtgtgccggccaggggcagaaggcgtgacggctggtcgagggcggcaacctcccagcgtcctgcacgactgacaagagtcaggccgtactggctagtccgggtagtggattcgtcaccggtgggctggcatgtcacggtcaccgtgacggtaatcttctgccgatctgagggggtggggacctcgtcaggccccaccacatgagtggttttcaccgatacacacggggctgggtcaaccgcggtgaaagcggtccccgggctactccatctcgacaggtcagtattcccggtcagcatggcggccaagaaacccgaagaggtctgggcagccgggtcagcaggacgaatctccgaggagtccacgtcgggggctgaggccggtgcaggcatggggatctgcccaggtagacgcaaggcgatggccttgccgccggcatcgacgtggaccggaaccgaccaggcctgtccgctcccggattggccgcccatggtgaccacggtgacctgccacaggctcggatcagacggggagacggtagcgtcataggcggtgacggtggtgggcgctggaccaggtttgcggggcatgcgcgcatcggtgatcttggccgccaccaggtgttccagattgtccaagtgcccggagtcagaggtcagcagaagagtagtcacctcgaccgcggtggctgaggcgatctgagctgtgcggcggtcgtgatgggtggtgtcagtgctgacagctgtggtgggagcggatgccggggccgccgaacggaccagggcaacggggccgcatgcgactccgcacagcacgagggcaaggaagcctttggtggccatcgatccggtgtggggccagggacccacgttttcctgtgcctgttttttcttggccgaccaacggcgggacttagggttagcggatgcaccttctggggtgcatgctcgtctcaatcgcatcggtcacctccttcactggatgaagggaccaaggaggtgaccgatgtgcggtcgaacccgaaaaagttcaaacttttttctgggtctgcctcaagtacgacagaaggcctgcatcatcacggcgttgtggtagcagatcttgcgtcagcgcaaatgcatgggcctcgtaggagtagctcttaggtaggtcccggtggttgcggccagggcgagggtgtcgggtatgtgtagcgctagtcccgggttcgtggtgtgagggcttttgggtgctgacatgcactacccattgctagacgctgtgctgtggcatggctggacgtctagcagacgggttgacatcacctttaggctggcagcgcccgaggccgcaggccagaggaagcggacagcctaacgattgacgtccccctctcctttccccaacctcctggagtcgatgacccggagatagatcgatgtctatgcatcggtgcatcgatatacctatgtatctgtctgtggtttttagaggccactcccgtcgccccgggccgctcagcgataccgcaaggctgtgtgggatcag

SEQ ID NO: 222 - DNA, 8231 bp, Propionibacterium acnes
gggatgaggatgacggccgcgccgacacttcggagcgaggtcatgtgacgatccttcggtagctcgacgggttgccgtagatcttttccacgttgatgccgctgtgggggttgtcggcgctaaccatttggcctccaccgatgtagacggccacgtggtgggcagggcttccccagaggatgaggtcgccgactttgagctggtcacgggccaccgcggtgccgacgtgctgttgttcggcggcggtgcggggaaggctaatgccgatacgccggtacagcgccgaggtcaggcctgagcagtcgtagccgccatcggctttgccgttgccaccccacacgtaggcgtaggagttgttgtcggcgatcgatttggcccatgccacggcttcggccaggttcttcgacacaccggtctcgttagcggccccggtggcacagttgtttgacaggtgccctgtagtagtggatcccactatttgtttggccatggtttcccatttggcgtaggcatcgggcagggctgagccttgcactgcctgagctgcctgcgtcagcggcatcttctgccagtcagcgatgtcgactaaaccgggaatgtggaatccagggccgccggccgatccggggccagcgtaggtgatggtgtggcctttcaagaacgcctcggtggcgtaggcatcattgttgacctgatccagagtcccgtaccagcccggcaggatgcgctgctgaaaggggccggcgtcaccgtcaccgttagccttcgctgaggtagggtcggccccaagatctgattcttgtttggcggtcatgatagcgatgaccgctgcctgggtaggcagtttgtcacgctggaccacagtgacgatggtggtcacgagctgcttctgcctggccgtgaggcctccggcacccacagtgcctccggtgacggtacccacgcaagcatccccgccgacactgccaccgccgccgccagagttgtcgtcgagggccccagagcctactgacagcagcggcacaatgatcacggtcgcgggcaagaccgccaggcccgccagcatcagcactgctgcactcaccacggcgatcacgtgagatgctttcaacgctgcccacctctcgctggtttgagggggcgacgcctgctggtacgcacaggcttggttgatccagtccgccgttgattggcaggcctgggtttgatcggcttgctgggacccggtttgggctccggagtcttaggctccggcttcacatgcctaggcacttcggctgcggtgggaggagtcagcacgtggcgtaccggcttggtgaccttctgggcacccgaaacaaccggcttagacaccaccttggcacctttgaccaccggtgcggctgccttcgcgccggccttcttgactgcacgatgcgctttgatagccccggcctcggcccggccaaccctactagcagtagcatcgagggctctgtggcccgtcgttgccctcaccggtgcatccttgccctggcgggtctgcttagcgatcgccgacatgccgcctcgcaatgccgaaacatgattgtgggcgtgggcgatcgccgacataccggccgtcgcgatttttgactggccctgcggggcccctgccccagcacgaatctgccggtaagccgccgacgtgccacgagcacccgccgccattcgcgccaccttcgcagccctagtcactcccgtcgacacgccacccgtggctaccgcagcagcacccgagaccacagtcgaggccatccgccttcgacccaatccggtgagcttgcgaccaccgctgcgcaccatccggcgagcaccccgcccagcccactggccgatcaccgagcccctttcggaacgcttgctgcgcatccaatcgttgatcttgtccctcagccccttctcgcccttgtgacgacgccacatggacatcaagaacccgataatccccacgagctcgagcatgttgacaaccatgaccttgatggcgacatcaccgtcagaggcgaaaaccgacttgatgatgagcatgaccacacccaacatcaccatcgacccgacaatgccgatcatcgagtacaagatcgaacacagatcccggatgagcggatctgtgcggccagggatagcccgcaacacgttgagcatcgacatgaacgccgaccacaccaacttgcacacgtagaaccagcacatgcccgcgaacaccagcaggaccacagccaaacccgccaccgtcgacgagtaaaagaagaaccccaccaaccacgaaccatccgcaatatcgccggcgtaatccgacaacccctcatcacagtcaccaaggtcgtcgcgagcatccgagacgtcatcgtaagggccacccttgagcacctcgatgtacttgtcgtggcacttcgcatcaataatccggccatagttgagctgctgatgaaccggcgccacgaacgagtccacaatgatcgccgacagcttcggatccttcgagtctcccgtcgaggtcatgtcatcaggaatctcgacctcaccagcggtcgccgtcgcaggatcaaccgaactggtaatcatccgagacagcgccacaccgaactgctgggtgcgagccagcggagtagccaacgtcgtcgtatcgcctgcgaacttcgccaccggggccgccaagaaacccaacgccagcgccgcagcaatcgccgcacgcgcccccgtagcccacgcccctgccgtacgtcccctcatcatcttgacgaccacgcccacaccggcgcacgtcgtcagcaacgtcaacaccgttccaccccagctgtccgctcccagcggggccaaaaccttgtcgtggatgtcgttctgtaaccccaccagcggtccggtaatccacccgacccagctcatcgccacggtccagtccaacaaccggcacaacagggcaatgaccatcaggtacgtgttccaacacatgccaataatggaggcccacatagccttcagcggggccgtaacgccaccatcgtccatcgacatctggtactgaaacaagtgaataccgttggagtcagtcacattgaaaccgtcacccatccagcccagccccgggcccgatgccatggcaggcacactgctcagcgccaccaccaaaaccagcgtggtgacgatgatacggaaccgccgctccccggccccggggcggcgtggatgacggctcacgctgtctcctggtcgtgctcgggcgggttggagctggcggcttcgcggtggggagcgtaggcaggtctcagtagtcgaatttcaccgacgttgccgtgttggtcggcgtacaggccacaaccggggcctccggggttgagggcaatcttgaccaggtcagcgaactcttcaggggacgtcttagggtccacgcccaggaactcgacacctttctgggcgaggttgatgttgtcgcacagcaacacgatgcgatgctgaatgaggttgcggacggtctcgttggggtaatcggcctcggggtcgtgggagccggtgataagccaggcattggctcggcgggattcgcgcacgtactcgtcaatggcgtgggaggcttccggcgaggacgacatgtgatgaaactcgtcaacaatgaaagcggcgtcgcgggcccggtcgctgaagcacaccaggcgagccagacgggcaataagcgcgtagagggctcgaccaaacaccttgtgcgggggcagctgccgaaacaaatgttctgacagcatctcctcggcgttaggaagagcgatgccacaagtgccaatgatgaggatgtcggcactcaggtcggcgggaggaaggtccgggtcaaagatggccgaagctagggaggccgagttctcgatgtcagcgaacacggcaatcctgtcagcgatcgcggtggcctcgggaaggtcgcactcctcggccaggtggcgggccaaacgcccacacgaggtgatctggtggtcacgcatgtaggccggtttgaggaccttggccagcgtggtcccggccacaccgatggtctccaagttaagcaaggtcagcaagaacgactgggcgacctgcccggccatctccgggggaaggatgcgcagcgggtccagcgacagcttggggtgggccgtgtcgacgatctggcgtctaaccccgtcgatagagttgacaaaggttacccactcccgctcatcggagttgtcggtggcaataatgcgcccgccccgggccgcgatggctgcgcacagccgcttctcggccatcgtcttgcccgcgcccatcttgccgatgaacgccaccgtgttgcctttctgatcctgagtgtcggcatgcaaatcgaggtaggccagcgactgcaacggggagcctgtgaccacagccaacgggatgccggtggtacggcccaaccggtactcaaccaccgggatagatgcggcgaacgcggaggcgtgagtcagctgacggtaggcgttaagcgaggaggagaaccggccaccgggccgggcagcccacagcaagtcctcctgacggcccacgggacgcacccacgtgaagtcaccgaacaccggatcattgacgaacgctcctgccagctcctcggtggtctcaaagtcaggagacgagacagtgacggtgataagagcctggatctcgacctcacgctcatcggcggccagctcggcgttgtagtcgacgagcacctgagcggaatgctcgatagacatgagggtcgaagcctgggtcatctcaccgccctcaacattgtcgagctgatcgaccgtttgacggatagcccgctgatttttctgcatcgcagcgtgacgggtccgggccactccccggatcgccacgtcgaccggcacgccagtgtcgtcgatacggcccaaaaactcgtaggcaggccacgtcatcgtgcggggcaccttacccagcacgatatgggactggtagacggtctcgccggtgtcggcaccgattttgaggacgcgacgattccacgcctgagccgtccgggacatgtgggagactcgcttgtcatcctcgctggccagcaggtcggaggtcgcggcctcatcgatgaccaactcccccagcgcggcacgtccaacctcatccatgagggcgattccctcgccaggggcatcatcacgcaaccgggtcgggtggcctgacaggtgctgccgaagccagatctgttcatcaacggtgaccgggcggggttggaacgctgccggcagtttcgcaccgaattccttagcctgacggagggcccactcccgtgcgacacggccaggagcggtggtcatgagtccggcggcttcggtgattttgttgagggcggcggtccaggcggtgtgggtgcgtattttctggtcttggttgagtttgatcgataggaaccacacgcgccggcctagggattcggtttcaggctggtcgagggtggcgtcgatttcgtcggcccacacggggtgttcgctcaggtcaaggccggcggccatggcgtcgacgatttctgtggggtcggtccaggtgagggctccgttgaggcagaactcgtggcgggcgaggtggcggaataggtcgcggtgagctgcggcgacggtgagggaggcgttctcggtgacgggtcgctggaggggagtgagtcgccaggtggcccagatgtcgccggtggaggtccagacgaggttgtcgaagaggaaccgttcggggatggacatcatgactccttttcggcggcggcgaggaaggcttccaggccgctgcggcgtacagcgttcccggtagggtgcaggggttttctgggggtgggttcagatttcgaatgtgggaagagtttgtggatggtatcggtgtcctcggcgagggcttggtcgagcaggcaggtggccggggtgtcggtagtctcgtccagctcgtcgatcatctcgtcgaggaggttgggggtggtggatgcggcccacacaggtgggatagccggtgcgggtcgaggcggtgtggggaggcggagtttggtttggccccagaggggtgtgtgggtcatgccggcgggagtggtggcggcgtgagtggtcacacgccaccagcccgacagccatgccagaggtgaccaggtccagtcgatgcgaccaacaacgaactgggcgagccatccggcagccagcgcgaaaatgaaaccgcggatggtcatgcccccgtcgataattttgaagcccatcatcgcggcaggaactacgccgccgacagcgagcacctgatagatcgtgtagggcccgccaggaatccttcgacctgaggaatccttaccgataatgcggggctgctggcgggcctcggtgtgccactgaatatccacgatcagctcttgcccaatccttgcatcatctgtccgaagaattggatcgcgttaccttcgataagccagtgcgccataccacacacaaacagcatggagacgatcttggccaggctcataccgtgtttgaagatgttgaacgcggcaatgcccacgactacgaccatggcgacggctcgcaccgcggactgaccttcacctgccttgatcgtcgtccattcgaagaggttctgcgattccagtggcagcaggaggaattgatcgagcatgagaggttttcctttcaggaagccgaccgggatggtcccggtactgacgggctggacggcacgggtgtgccggccaggggcagaaggcgtgacggctggtcgagggaggcaacctcccagcggcctgcacggctgacaagagtcaggccgtactggctggtccgggtagtggattcgtcgccggtgggctggcatgtcacggtcaccgtgacggtaatcttctgccggtctgagggggtggggacctcgtcaggtcccaccacatgagtggttttcactgatacgcatggggctgggtcaaccgcggtgaaagcggtccctgggctgctccatctcgacaggtcggtattcccggtcagcatggcggttaggaagcctgaagaggcttgggcggccgggtcggcggtgcgaagctccgaggtgtctagggtgggggctgaggccggtgcaggcatggggatctgtccaggtagacgcaaggcgatggccttgccgttggaatcgacgtggaccgggactgaccaggcctgtccgctcccggattggccgcccatggtgaccacggtgacctgccacaggctcggatcagacggggagacggtagcgtcataggcggtgacggtggtgggcgctggaccaggtttgcggggcatgcgcgcatcggtgatcttggccgccaccaggtgttccagattgtccaagtgcccggagtcagaggtcagcagaagagtagtcacctcgaccgcggtggctgaggcgatctgagctgtgcggcggtcgtgatgggtggtgtcagtgctgacagctgtggtgggagcggatgccggggccgccgaacggaccagggcaacggggccgcatgcgactccgcacagcacgagggcaaggaagcctttggtggccatcgatccggtgtggggccagggacccacgttttcctgtgcctgttttttcttggccgaccaacggcgggacttagggttagcggatgcaccttctggggtgcatgctcgtctcaatcgcatcggtcacctccttcactggatgaagggaccaaggaggtgaccgatgtgcggtcgaacccgaaaaagttcaaacttttttctgggtctgcctcaagtacgacagaaggcctgcatcatcacggcgttgtggtagcagatcttgcgtcagcgcaaatgtatgggcctcgtaggagtagctcttaggtgggtcccggtggttgcggccagggcgagggtgtcgggtatgtgtagcgctagtcccgggttcgtggtgtgagggcttttgggtgctgacatgcactacccattgctagacgctgtgctgtggcatggctggacgtctagcagacgggttgacatcacctttaggctggcagcgcccgaggccgcaggccagaggaagcggacagcctaacgattgacgtccccctctcctttccccaacctcctggagtcgatgacccggagatagatcgatgtctatgcatctgtgcatcgatatacctatgtatctgtctgtggtttttagaggccactcccgtcgccccgggccgctcagcgataccgcaaggctgtgtgggatcagct

SEQ ID NO: 223 - DNA, 2020 bp, Propionibacterium acnes
ttgggtccccagatcgacgtggatacggcaggcggctgccatgcgcagcagggagccgatccagccgaaaacggggcattctccgggcatcccagagaccttgatcgttgaccaccagtttttcgcgttgccgtagaactggcggtactcgtcgatgaggaccagcacgcgggtgaagtcggtctcgcgggccccttcttcttcgatgcggcggtagcggtcctccatgagagaccacagccagtggatgagggcgacctggtcggggacggtagtggcgaccatctcgatgttgggccactcccgcaggcccaggtactcgatgcgtttagggtcgatgacgaagacgcgccagttgcggcgggcaccctcgacggcgtcgccgatcatggacaccgtttttccggtacgggtgcggccggccttgagctggtgggccatgacaccggagatgtcccagaaacaggtgttgccgtcctcgtcgacggcctgggggattttctcccagtctggggagtctgggcccggaagggccacgggtcggggcaccatcgagggcagggggtggcggcgggtgacggtgatggtgtcgtgttccaggtcgaagtcgctgcgccactggccgagcatcatcgccgaggtcaccgcggccaggcgcaattggatgttcgggctggacaaatgggcgccacgttggtggtgaatggtgaagccgtccaggttcccccgatcggttttccaggaatcgacggtgaccgccgacccatagatctgagtggctacttctttagcccgttccttgtctcggtccagatcggttttgtcagggtcaggggtcggggcgcggtattgcaggacgaaccggccggccgggatcgttgcggatgtcaccgtgaactctgccggcgaccaggcagccgcggccgcctgggtgagggccattggcatggtctcgacggcagcctcctcgggggggatggtgagggtcaggcgtcgcggatgcgtcttcttgcgattccatgtgactttctgcctcaccggcaccttcgccgccgactgaatggctaggcgagctgattcggcagtttcggtacgccggccagcgcgtagcgcccgtcgtgcgtgaaggctgcccaccacagcacagcccatacacggcagccaccagcgcggatcagcggctgctgcatagcccccggtagctagtaccgcacctgaccagccggccgcgatacttttccacgccggtttcgcgccaccaggaccagcgttatggacggtctgcttcgaggctgcggagggacgagacagcggagtgctggtcatgctgcggcctccttgtggcaggtcatttcacaggcatgccggccagcgatgatgccgtggcgcaccgccccggtagccgcatagaccgcgcacaactcaaacacggggcacccatcgcaggccgccggatccatgctctctttgtcccacgatggtgggtcatcggtgcacggcacggccaggccatcctgttgagcggcgctgatagcggtgaataggcgcagctgggcgcgaacttggtctggggtcaggttgacggtgcgggctacacgcatggggttccttcctcttcaccagtgaaggttccctagacccggccgatgtgcggagggatttcagtgttttatcgaggtgaccagccagccggtctgcgctgcgggttcaggtaccagggtcagatgcagcatggtgtggtcggctaggggcacggcgaccaggggcccgtcggcgctcgccccggtgagggtgggagttccggccacggtggtggcaggaatctggttgggtttcgcggccatcagggagcccatgagggtcggtgcggcgatctggacgagggcgactttgcgggcggcgggatcgcgggtcaaccagccgcgggtgaaagcgagcgccgccgacgtgatatcggggctcagcggggctggagtggcggctgggtgggccgttgaggagggccacacgcgcggtagcg

SEQ ID NO: 224 - DNA, 8643 bp, Propionibacterium acnes
caacgctggattcggcgatggtcacccattctccgtcgatattgatgagcaccccagcggccagctccgtggcagcaaccgggtgaggtgggttgtagaagcggtcgatgtcgcaggcagggtcgtcgggttcctcgactaccggaggtggggtcgatctggctgtctcggtgtcgtcggccaggtcggctcccaggatgcgctcccattcggggctggttttcttgcccgctgaggccatcgtctcgtcgatctgttcgtcagtgggccacacaaatttctttttggtccaggtcgtggtgtcgggtcgcagctgatccagcagttccaggtcttgcggggagtgggccttgcgggggtcgggggtgtagaagaattggacttccttgggggctgattcgccggataggtaggtgccgcggccgcgtttgccgaacgggatgcccacgccgacgtgttcggagccgaacatcatgcgggctccgtcagcggacaggggtccggtggcggcacgcccggagaagttgtctcggatttcgccgcccaggaactcggcgtcggggcgttgggtccccagatcgacgtggatacggcaggcggctgccatgcgcagcagggagccgatccagccgaaaacggggcattctccgggcatcccagagaccttgatcgttgaccaccagtttttcgcgttgccgtagaactggcggtactcgtcgatgaggaccagcacgcgggtgaagtcggtctcgcgggccccttcttcttcgatgcggcggtagcggtcctccatgagagaccacagccagtggatgagggcgacctggtcggggacggtagtggcgaccatctcgatgttgggccactcccgcaggcccaggtactcgatgcgtttagggtcgatgacgaagacgcgccagttgcggcgggcaccctcgacggcgtcgccgatcatggacaccgtttttccggtacgggtgcggccggccttgagctggtgggccatgacaccggagatgtcccagaaacaggtgttgccgtcctcgtcgacggcctgggggattttctcccagtctggggagtctgggcccggaagggccacgggtcggggcaccatcgagggcagggggtggcggcgggtgacggtgatggtgtcgtgttccaggtcgaagtcgctgcgccactggccgagcatcatcgccgaggtcaccgcggccaggcgcaattggatgttcgggctggacaaatgggcgccacgttggtggtgaatggtgaagccgtccaggttcccccgatcggttttccaggaatcgacggtgaccgccgacccatagatctgagtggctacttctttagcccgttccttgtctcggtccagatcggttttgtcagggtcaggggtcggggcgcggtattgcaggacgaaccggccggccgggatcgttgcggatgtcaccgtgaactctgccggcgaccaggcagccgcggccgcctgggtgagggccattggcatggtctcgacggcagcctcctcgggggggatggtgagggtcaggcgtcgcggatgcgtcttcttgcgattccatgtgactttctgcctcaccggcaccttcgccgccgactgaatggctaggcgagctgattcggcagtttcggtacgccggccagcgcgtagcgcccgtcgtgcgtgaaggctgcccaccacagcacagcccatacacggcagccacgagcgcggatcagcggctgctgcatagcccccggtagctagtaccgcacctgaccagccggccgcgatacttttccacgccggtttcgcgccaccaggaccagcgttatggacggtctgcttcgaggctgcggagggacgagacagcggagtgctggtcatgccgcggcctccttgtggcaggtcatttcacaggcatgccggccagcgatgatgccgtggcgcaccgccccggtagccgcatagaccgcgcacaactcaaacacggggcacccatcgcaggccgccgggttcatgctttctttgtcccacgatggtgggtcatcggtgcacggcacggccaggccatcctgttgagcggcgctgatagcggtgaataggcgcagctgggcgcgaacttggtctggggtcaggttgacggtgcgggctacacgcatggggttccttcctcttcaccagtgaaggttccctagacccggccgatgtgcggagggatttcagtgttttatcgaggtgaccagccatccggtctgcgctgcgggttcaggtaccagggtcagatgcagcatggtgtggtcggctaggggcacggcgaccaggggcccgtcggcgctcgccccggtgagggtggggggtccggccacggtggtggcgggaatctggttgggtttcgcggccatcagggagcccatgagggtcggggcggcgatctggacgagggcgactttgcgggcggcgggatcgcgggtcaaccagccgcgggtgaaggtgagcgcagccgacgtgatatcggggctcagcggggctggtgtggcggcggggtgggccgttgaggagggccatacgcgcggtagcgctggcgacatcgagcgggtcggagtggggtcaggtgtggggcttagggtccgatgtggcgatggggctaccgccccggtggtgggagacgagactggttgggggtggtgttgagggcgtgggatcagggtgaaggcagccaaactggccgggatgaggatgacggccgcgccgacacttcggagcgaggtcatgtgacgatccttcggtagctcgacgggttgccgtagatcttttccacgttgatgccactatgtgggttgtcggcgctaaccatttggcctccaccgatgtagacggccacgtggtgggcagggcttccccagaggatgaggtcgccgactttgagctggtcacgggccacagcagtgccgactttctgctggtcggcggcggtgcggggaaggctaatgccgatacgccggtacagcgccgaggtcaggcctgagcagtcgtagccgccatcggctttgccgttgccaccccacacgtaggcgtaggagttgttgtcggcgatcgatttggcccatgccacggcttcggccaggttcttcgacacaccggtctcgttagcggccccggtggcacagttgtttgacaggtgccctgtagtagtggatcccactatttgtttggccatggtttcccatttggcgtaggcatcgggcagggctgagccttgcactgcctgagctgcctgcgtcagcggcatcttctgccagtcagcgatgtcgactaaaccgggaatgtggaatccagggccgccggccgatccggggccagcgtaggtgatggtgtggcctttcaagaacgcctcggtggcgtaggcatcattgttgacctgatccagagtcccgtaccagcccggcaggatgcgctgctgaaaggggccggcgtcaccgtcaccgttagccttcgctgaggtagggtcggccccaagatctgattcttgtttggcggtcataatagcgatgaccgctgcctgggtaggcagtttgtcacgctggaccacagtgacgatggtggtcacgagctgcttctgcctggccgtgaggcctccggcacccacagtgcctccggtgacggtacccacgcaagcatccccgccgacactgccaccgccgccgccagagttgtcgtcgagggccccagagcctactgacagcagcggcacaatgatcacggtcgcgggcaagaccgccaggcccgccagcatcagcactgctgcactcaccacggcgatcacgtgagatgctttcaacgctgcccacctttcgctggtttgagggggcgacgcctgctggtacgcacaggcttggttggtccagtccgccgttggttggcaggcctgggtttgatcggcttgctgggacccggtttgggctccggagtcttaggctccggcttcacatgcctaggcacttcggctgcggtgggaggagtcagcacgtggcgtaccggcttggtgaccttctgggcacccgaaacaaccggcttagacaccaccttggcacctttgaccaccggtgcggctgccttcgcgccggccttcttgactgcacgatgcgctttgatagccccggcctcggcccggccaaccctgctagcagtagcatcgagggctctgtggcccgtcgttgccctcaccggtgcatccttgccctgacgggcctgcttcgcgatcatcgacataccgccccgcaacgccgaaacacggttgtgagcgtgggcgacggccgacataccagctgtcgtaattttcgactggccctgcggagctcctcccccggtacggatctgacgatatgacgccgaagcacgccgcgccgccgaggccattcgcgccatcttcgcagcccgggtcactcccaccgacgcgccaccggtgactaccgcagccgcagccgaaaccatccgccttcgacccaatccagtgagcttgcgaccaccgctgcgcaccatccggcgagcaccccgcccagcccactggccaatcgccgacgccccttcagagcgcttactacgcatccagtcgttgatcttggccctcagcccctcctcacccttgtgactacgccacagagacaccaagaatccgatgattcccacgatttccaacatgttgacgaccatgaccttgatgacaacgttgccatcagaggcgaagaccgacttgatgacgagcatgaccacgcccagcatcaccatcgacccaacaatgccgatcatcgagtacaagatcgaacacagatcccggataagcgggtctgtgcgaccaggaatagcccgcagcacgttgagcatcgacatgaacgccgaccacaccaacttgcacacgtagaaccagcacatgcccgcgaacaccagcaggattgctgccaaacccgtcaccgttgacgagtaaaagaagaaccccaccaaccaggaaccgtccgcaatatcgccggcgtaatccgataatccctcgtcacaatcaccgaggtcgtcgcgtgcatccgagatatcgtcgtaaggaccacctttgagcacctcgatgtacttgtcgtgacatttggaatcaataatgcggccgtagttgagttgctgatgaaccggcgccacgaacgagtccacaatgatcgccgacagcttcggatccttcgagtctcccgtcgaggtcatgtcatcaggaatctcgacctcaccagcggtcgccgtcgcaggatcaaccgaactggtaatcatatgagacagcgccacaccgaactgctgggtgcgagccagcggagtagccaacgtcgtcgtatcgcctgcgaacttcgccaccggggccgccaagaaacccaacgccagcgccgcagcaatcgccgcacgcgcacccgtagcccacgcccctgccgtacgtcccctcatcatcttgacgaccacgcccacaccggcgcacgtcgtcagcaacgtcaacaccgttccaccccagctgtccgctcccagcggggccaaaaccttgtcgtggatgtcgttctgtaaccccaccagcggtccggtaatccacccgacccagctcatcgccacggtccagtccaacaaccggcacaacagggcaatgaccatcaggtacgtgttccaacacatgccaataatggaggcccacatagccttcagcggggccgtaacgccaccatcgtccatcgacatctggtactgaaacaagtgaataccgttggagtcagtcacattgaaaccgtcacccatccagcccagccccgggcccgatgccatggcaggcacactgctcagcgccaccaccagaaccagcgtggtgacgatgatacggaaccaccgctccccggttccggggcggcgtggatgacggctcacgctgtctcctggtcgtgctcgggcgggttggagctggcggcttcgcggtggggagcgtaggcaggtctcagtagtcgaatttcaccgacgttgccgtgttggtcggcgtacaggccacaaccggggcctccggggttgagggcaatcttgaccaggtcagcgaactcttcaggggacgttttagggtccacgcccaggaactcgacacctttctgggcgaggttgatgttgtcgcacagcaacacgatgcgatgctgaatgaggttgcggacggtctcgttggggtaatcggcctcggggtcgtgggagccagtaatgagccaggcgttggctcggcgggactcacgcacgtactcgtcgatggcgtgggaggcttccggcgaggacgacatgtgatgaaactcgtcaacaatgaaagcggcgtcgcgggcccggtcgctgaagcacaccaggcgagccagacgggcaatgagcgcgtagagggctcggccaaacaccttgtgcgggggcagctgccgaaacagatgttctgacagcatctcctcggcgttaggaagagcgatgccacaagtgccaatgatgaggatgtcggcactcaggtcggcgggaggaaggtccgggtcaaagatggccgaagctagggaggccgagttctcgatgtcagcgaacacggcaatccggtcggcgatcgcggtggcctcgggaaggtcgcattcctcggccaggtggcgggccagacgcccacacgaggtgatctggtggtcacgcatgtaggccggtttgaggaccttggccagcgtggtcccggccacaccgatggtctccaagttaagcaaggtcagcaagaacgactgggcgacctgcccggccatctccgggggaaggatgcgcagcgggtccagcgacagcttggggtgggccgtgtcgacgatctggcgtctaaccccgtcgatagagttgacaaaggttacccactcccgctcatcggagttgtcggtggcaataatgcgcccgccccgggccgcgatggctgcgcacagccgcttctcggccatcgtcttgcccgcgcccatcttgccgatgaacgccaccgtgttgcctttctgatcctgagtgtcggcatgcaaatcgaggtaggccagcgactgcaacggggagcctgtgaccacagccaacgggatgccggtggtacggcccaaccggtactcaaccaccgggatagatgcggcgaacgcggaggcgtgagtcagctgacggtaggcgttaagcgaggaggagaaccggccaccgggccgggcagcccacagcaagtcctcctgacggcccacgggacgcacccacgtgaagtcaccgaacaccggatcattgacgaacgctcctgccagctcctcggtggtctcaaagtcaggagacgagacagtgacggtgataagagcctggatctcgacctcacgctcatcggcggccagctcggcgttgtagtcgacgagcacctgagcggaatgctcgatagacatgagggtcgaagcctgggtcatctcaccgccctcgacgttgtcgagctggtcgacggtttggcggatggcccgctgatttttctgcatcgcagcgtgacgggtccgggccactccccggatcgccacgtcgaccggcacgccagtgtcgtcgatacggcccaaaaactcgtaggcaggccacgtcatcgtgcggggcaccttacccagcacgatatgggactggtagacggtctcgccggtgtcggcaccgattttgaggacgcgacgattccacgcctgagccgtccgggacatgtgggagactcgcttgtcatcctcgctggccagcaggtcggaggtcgcggcctcatcgatgaccaactcccccagcgcggcacgtccaacctcatccatgagggcgattccctcgccaggggcatcatcacgcaaccgggtcgggtggcctgacaggtgctgccgaagccagatctgttcatcaacggtgaccgggcggggttggaacgctgccggcagtttcgcaccgaattccttagcctgacggagggcccactcccgtgcgacacggccaggagcggtggtcatgagtccggcggcttcggtgattttgttgagggcggcggtccaggcggtgtgggtgcgtattttctggtcttggttgagtttgatcgataggaaccacacgcgccggcctagggattcggtttcaggctggtcgagggtggcgtcgatttcgtcggcccacacggggtgttcgctcaggtcaaggccggcggccatggcgtcgacgatttctgtggggtcggtccaggtgagggctccgttgaggcagaactcgtggcgggcgaggtggcggaataggtcgcggtgagctgcggcgacggtgagggaggcgttctcggtgacgggtcgctggaggggagtgagtcgccaggtggcccagatgtcgccggtggaggtccagacgaggttgtcgaagaggaaccgttcggggatggacatcatgactccttttcggcggcggcgaggaaggcttccaggccgctgcggcgtacagcgttcccggtagggtgcaggggttttctgggggtgggttcaggtttcgggtctgggaggggtttgggctcgtaggtggtgtcgatgtcttcggcgaggacgtggtcgagcaggcaggtggccggggtgtcg

SEQ ID NO: 225 - DNA, 8232 bp, Propionibacterium acnes
gggatgaggatgacggccgcgccgacacttcggagcgaggtcatgtgacgatccttcggtagctcgacgggttgccgtagatcttttccacgttgatgccactatgtgggttgtcggcgctaaccatttggcctccaccgatgtagacggccacgtggtgggcagggcttccccagaggatgaggtcgccgactttgagctggtcacgggccacggcagtgccgactttctgctggtcggcggcggtgcggggaaggctaatgccgatacgccggtacagcgccgaggtcaggcctgagcagtcgtagccgccatcggctttgccgttgccaccccacacgtaggcgtaggagttgttgtcggcgatcgatttggcccatgccacggcttcggccaggttcttcgacacaccggtctcgttagcggccccggtggcacagttgtttgacaggtgccctgtagtagtggatcccactatttgtttggccatggtttcccatttggcgtaggcatcgggcagggctgagccttgcactgcctgagctgcctgcgtcagcggcatcttctgccagtcagcgatgtcgactaaaccgggaatgtggaatccagggccgccggccgatccggggccagcgtaggtgatggtgtggcctttcaagaacgcctcggtggcgtaggcatcattgttgacctgatccagagtcccgtaccagcccggcaggatgcgctgctgaaaggggccggcgtcaccgtcaccgttagccttcgctgaggtagggtcggccccaagatctgattcttgtttggcggtcatgatagcgatgaccgctgcctgggtaggcagtttgtcacgctggaccacagtgacgatggtggtcacgagctgcttctgcctggccgtgaggcctccggcacccacagtgcctccggtgacggtacccacgcaagcatccccgccgacactgccaccgccgccgccagagttgtcgtcgagggccccagagcctactgacagcagcggcacaatgatcacggtcgcgggcaagaccgccaggcccgccagcatcagcactgctgcactcaccacggcgatcacgtgagatgctttcaacgctgcccacctctcgctggtttgagggggcgacgcctgctggtacgcacaggcttggttgatccagtccgccgttggttggcaggcctgggtttgatcggcttgctgggacccggtttgggctccggagtcttaggctccggcttcacatgcctaggcacttcggctgcggtgggaggagtcagcacgtggcgtactggcttggtgaccttctgggcacccgaaacaaccggcttagacaccaccttggcacctttgaccaccggtgcggctgccttcgcgccggccttcttgactgcacgatgcgctttgatagccccggcctcggcccggccaaccctgctagcagtagcatcgagggctctgtggcccgtcgttgccctcaccggtgcatccttgccctggcgggtctgcttagcgatcgccgacatgccgcctcgcaatgccgaaacatgattgtgggcgtgggcgatcgccgacatgccggccgtcgcgatttttgactggccctgcggggcccctgccccagcacgaatctgccggtaagccgccgacgtgccacgagcacccgccgccattcgcgccaccttcgcagccctagtcactcccgtcgacacgccacccgtggctaccgcagcagcacccgagaccacagtcgaggccatccgccttcgacccaatccggtgagcttgcgaccaccgctgcgcaccatccggcgagcaccccgcccagcccactggccgatcaccgagcccctttcggaacgcttgctgcgcatccaatcgttgatcttgtccctcagccccttctcgcccttgtgacgacgccacatggacatcaagaacccgataatccccacgagctcgagcatgttgacaaccatgaccttgatggcgacatcaccgtcagaggcgaaaaccgacttgatgatgagcatgaccacacccaacatcaccatcgacccgacaatgccgatcatcgagtacaagatcgaacacagatcccggatgagcggatctgtgcggccagggatagcccgcaacacgttgagcatcgacatgaacgccgaccacaccaacttgcacacgtagaaccagcacatgcccgcgaacaccagcaggaccacagccaaacccgccaccgtcgacgagtaaaagaagaaccccaccaaccacgaaccatccgcaatatcgccggcgtaatccgacaacccctcatcacagtcaccaaggtcgtcgcgagcatccgagacgtcatcgtaagggccacccttgagcacctcgatgtacttgtcgtggcacttcgcatcaataatgcggccatagttgagctgctgatgaaccggcgccacgaacgagtccacaatgatcgccgacagcttcggatccttcgagtctcccgtcgaggtcatgtcatcaggaatctcgacctcaccagcggtcgccgtcgcaggatcaaccgaactggtaatcatccgagacagcgccacaccgaactgctgggtgcgagccagcggagtagccaacgtcgtcgtatcgcctgcgaacttcgccaccggggccgccaagaaacccaacgccagcgccgcagcaatcgccgcacgcgcacccgtagcccacgccccagccgtacgtcccctcatcatcttgacgaccacgcccacaccggcgcacgtcgtcagcaacgtcaacaccgttccaccccagctgtccgctcccagcggggccaaaaccttgtcgtggatgtcgttctgtaaccccaccagcgggccggtaatccacccgacccagctcatcgccacggtccagtccaacaaccggcacagcaacgcaatgaccatcaggtacgtgttccaacacatgccaataatggaggcccacatagccttcagcggggccgtaacgccaccatcgtccatcgacatctggtactgaaacaagtgaataccgttggagtcagtcacattgaaaccgtcacccatccagcccagccccgggcccgatgccatggcaggcacactgctcagcgccaccaccagaaccagcgtggtgacgatgatacggaaccgccgctccccggccccggggcggcgtggatgacggctcacgctgtctcctggtcgtgctcgggcgggttggagctggcggcttcgcggtggggagcgtaggcaggtctcagtagtcgaatttcaccgacgttgccgtgttggtcggcgtacaggccacaaccggggcctccggggttgagggcaatcttgaccaggtcagcgaactcttcaggggacgttttagggtccacgcccaggaactcgacacctttctgggcgaggttgatgttgtcgcacagcaacacgatgcgatgctgaatgaggttgcggacggtctcgttggggtaatcggcctcggggtcgtgggagccggtgataagccaggcattggctcggcgggattcgcgcacgtactcatcgatggcgtgggaggcttccggcgaggacgacatgtgatgaaactcgtcaacgatgaaagcggcgtcgcgggcccggtcgctaaagcacaccaggcgagccagacgagcaataagcgcgtagagagcccggccaaacaccttgtgcgggggcagctgccgaaacaaatgttctgacagcatctcctcggcgttaggaagagcgatgccacaagtgccaatgatgaggatgtcggcactcaggtcggcgggaggaaggtccgggtcaaagatggccgaagctagggaggccgagttctcgatgtcagcgaacacggcaatcctgtcagcgatcgcggtggcctcgggaaggtcgcactcctcggccaggtggcgggccaaacgcccacacgaggtgatctggtggtcacgcatgtaggccggtttgaggaccttggccagcgtggtcccggccacaccgatggtctccaagttaagcaaggtcagcaagaacgactgggcgacctgcccggccatctccgggggaaggatgcgcagcgggtccagcgacagcttggggtgggccgtgtcgacgatctggcgtctaaccccgtcgatagagttgacaaaggttacccactcccgctcatcggagttgtcggtggcaataatgcgcccgccccgggccgcgatggctgcgcacagccgcttctcggccatcgtcttgcccgcgcccatcttgccgatgaacgccaccgtgttgcctttctgatcctgagtgtcggcatgcaaatcgaggtaggccagcgactgcaacggggagcctgtgaccacagccaacgggatgccggtggtacggcccaaccggtactcaaccaccgggatagatgcggcgaacgcggaggcgtgagtcagctgacggtaggcgttaagcgaggaggagaaccggccaccgggccgggcagcccacagcaagtcctcctgacggcccacgggacgcacccacgtgaagtcaccgaacaccggatcattgacgaacgctcctgccagctcctcggtggtctcaaagtcaggagacgagacagtgacggtgataagagcctggatctcgacctcacgctcatcggcggccagctcggcgttgtagtcgacgagcacctgagcggaatgctcgatagacatgagggtcgaagcctgggtcatctcaccgccctcaacattgtcgagctgatcgaccgtttgacggatagcccgctgatttttctgcatcgcagcgtgacgggtccgggccactccccggatcgccacgtcgaccggcacgccagtgtcgtcgatacggcccaaaaactcgtaggcaggccacgtcatcgtgcggggcaccttacccagcgcaatgtgggactggtagacggtctcgccggtgtcggaaccgattttgaggacgcgacgattccacgcctgagccgtccgggacatgtgggagactcgcttgtcatcctcgctggccagcaggtcggaggtcgcggcctcatcgatgaccaactcccccagcgcggcacgtccaacctcatccatgagggcgattccctcgccaggggcatcatcacgcaaccgggtcgggtggcctgacaggtgctgccgaagccagatctgttcatcaacggtgaccgggcggggttggaacgctgccggcagtttcgcaccgaattccttagcctgacggagggcccactcccgtgcgacacggccaggagcggtggtcatgagtccggcggcttcggtgattttgttgagggcggcggtccaggcggtgtgggtgcgtattttctggtcttggttgagtttgatcgataggaaccacacgcgccggcctagggattcggtttcaggctggtcgagggtggcgtcgatttcgtcggcccacacggggtgttcgctcaggtcgaggccggcggccatggcgtcgacgatttctgtggggtcggtccaggtgagggctccgttgaggcagaactcgtggcgggcgaggtggcggaataggtcgcggtgagctgcggcgacggtgagggaggcgttctcggtgacgggtcgctggaggggagtgagtcgccaagtggcccagatgtcgccggtggaggtccagacgaggttgtcgaagaggaaccgttcggggatggacatcatgactccttttcggcggcggcgaggaaggcttccaggccgctgcggcgtacagcgttcccggtagggtgcaggggttttctgggggtgggttcagatttcaaatgtgggaagagtttgtggatggtatcggtgtcctcggcgagggcttggtcgagcaggcaggtggccggggtgtcggtagtctcgtccagctcgtcgatcatctcgtcgaggaggttgggggtggtggatgcggcccacacaggtgggatagccggtgcgggtcgaggcggtgtggggaggcggagtttggtttggccccagaggggtgtgtgggtcatgccggcgggagtggtggcggcgtgagtggtcacacgccaccagcccgccagccatgccagaggtgaccaggtccagtcgatgcgaccaacaacgaactgggcgagccatccggcagccagcgcgaaaatgaaaccgcggatggtcatgcccccgtcgataattttgaagcccatcatcgcggcaggaactacgccgccgacagcgagcacctgatagatcgtgtagggcccgccaggaatccttcgacccgaagagtccttgccgatgatgcggggctgctggcgggcctcggtgtgccactgaatatccacgatcagctcttgcccaatccttgcatcatctgtccgaagaattggatcgcgttaccttcgataagccagtacgccataccacacacaaacagcatggagacgatcttggccaggctcataccgtgtttgaagatgttgaacgcggcaatgcccacgactacgaccatggcgacggctcgcaccgcggacttgccttcacctgccttgatcgtcgtccattcgaagaggttccgtgtttccagtggcagcaggaggaattgatcgagcatgagaggttttcctttcaggaagccgaccgggatggtcccggtactgacgggctgggcgacacgggtgtgccgtccggaggcagaaggcgtgacggctggtcgagggaggcaacctcccagcggcctgcacgactgacaagagtcaggccgtactggctagtccgggtagtggattcgtcaccggttagctggcatgtcacggtcgcggtgacagcgatcttctgccgatctgagggggtggggatctcgtcaggccccaccacatgagtggttttcaccgatacacacggggctgggtcaatcgccgtgaaagcggtccccgggctactccatctcgacaggtcgtcgctgccactcagcatcgcggccaagaaacccgaagaggtctgggcagccgggtcagcaggacgaatctccgaggagtccacgtcgggggctgaggccggtgcaggcatggggatctgcccaggtagacgcaaggcgatggccttgccgttggaatcgacgtggaccgggactgaccaggcctgtccgctcccggattggccgcccatggtgaccacggtgacctgccacaggctcggatcagacggggagacggtagcgtcataggcggtgacggtggtgggcgctggaccaggtttgcggggcatgcgcgcatcggtgatcttggccgccaccaggtgttccagattgtccaagtgcccggagtcagaggtcagcagaagagtagtcacctcgaccgcggtggctgaggcgatctgagctgtgcggcggtcgtgatgggtggtgtcagtgctgacagctgtggtgggagcggatgccggggccgccgaacggaccagggcaacggggccgcatgcgactccgcacagcacgagggcaaggaagcctttggtggccatcgatccggtgtggggccagggacccacgttttcctgtgcctgttttttcttggccgaccaacggcgggacttagggttagcggatgcaccttctggggtgcatgctcgtctcaatcgcatcggtcacctccttcactggatgaagggaccaaggaggtgaccgatgtgcggtcgaacccgaaaaagttcaaacttttttctgggtctgcctcaagtacgacagaaggcctgcatcatcacggcgttgtggtagcagatcttgcgtcagcgcaaatgtatgggcctcgtaggagtagctcttaggtgggtcccggtggttgcggccagggcgagggtgtcgggtatgtgtagcgctagtcccgggttcgtggtgtgagggcttttgggtgctgacatgcactacccattgctagacgctgtgctgtggcatggctggacgtctagcagacgggttgacatcacctttaggctggcagcgcccgaggccgcaggccagaggaagcggacagcctaacgattgacgtccccctctcctttccccaacctcctggagtcgatgacccggagatagatcgatgtctatgcatcggtgcatcgatatacctatgtatctgtctgtggtttttagaggccaccccccgtcgccccgggccgctcagcgataccgcaaggctgtgtgggatcagct

SEQ ID NO: 226 - DNA, 4813 bp, Propionibacterium acnes
ccgaaacgttccagcccgccctgttcgagctagccgactgcgcatgagaccccacacaaacatggttgaatcgaagggctcagccagcagccagttaccaggagtccccgtgcgtctataccgcgctgttcttacccacaccgacatccagatcaccgtccgcatctggagcaccaccgaccacgactggacctggactcccctcgacacctggacccccgacccgaccccgaccacaccagcccagttagccgacgaactccaccgacacggatggaccacccccgaggaccccaccaccctcaccaaggtgactgtgatccccgagaactggcaggccctcgtcgaccacgccctcgctgcccgaaaccaccaagccaaccagctgcgcgtcgccgagaacatcctcaccgacatcctcggcgacgccgccgacgccggcctgtctgtcaccgctctcgcccgcacgaccggactatcccgagtcgccgtctacaaacgcagcgccaaaaccatcgactccatgagacacgccacccaggccggcggaatcctcaccccctcctgtctcacccacgctgagagaacagcgctcggcctgcccgacgagtaacccatcgtttacatcctcgactggtccctgcgaccagtgaaccgtgcccccactgcgcccacaatgatcagcacacccacggcgaccaccaggtgggaagcactaactgatcccaacgaaccaagatcaaacaagccctgcccgggagcgtcgagcagtccgtgggcgcgaagccatgctccgagattgccaatgatcttggggatcatcttgttcagtagggctatccctccgatgccgacaacgaggaagacgaggatttcttcgcctgcgttgtttcttcctgtgtttgcggtcatgctgccttctcggggtggatggccagccagctgatgaggttgtcggtgatctgccctgagatttggatcagttcgacttgcccggcctgccatgcccgcgatgtgccggccagcaatgatgctgggacccctactgcgcggccacgggatgcaacctcagccaaggcggcgcgtaactcctcgacggtgctttcgatgtaccaactgccgtcagtactagtctcggtggcgtcggtggtagcgataagagcatcggtgaggtcgtcgacggcgcggtccagatcagcgatgtccggtagggctacagcagtcatggtgtgtcttccttctagggtgccttcactggtgaagggtccctagccccggccgatgtgcggtgctgtgggaaaaatgcttcccattggtccgtcttagttaggaaacttggcctaagtgctgtcgagggtcgcgtgttcgtgaccggttcgaagacactgccgctttgccttcttgcccgtggcgcttccgagatgggttcagtgggcgatggctaggccgatgagggcgccgctgcacaggctgggtgcccaggggaggaatcgggtggtgtggtgtcggcagcggtcgatgagggcatatagggcgatcagggtgaggccggctatgaccgtggcgtggatcgtgtcgatgccggttgctgcggccggggctgcccacagtggtgtgatgcgcacgtcggagaagccgaagccgcctcgggagatgagccaggcgatcatccacgccgcggagatgacgacagtagcgatagcagcacggatcgccgcagtctggttcgcgagagcgatcatggccacagccccgatccatccaacccagccggtccaggcgaggactgccggtatccatgtggtgatggcgtcgatgacggctacccatgccccgatggtggctagcagagcccaggccggccaggtgggtgctggggcccacgctacggcggcgatcatggttgtcgcagatgcagcacagacagcgatcatgcttcggagactgtaggtgtcgcggtaggcgattttgtcgggggtggcggtggccggttcgggcaggatgcgagtgagggagggccatcctgcggtcgcaatggtcacgacggcggcgatccacacgatctggtgcatgggtctcatcatggcccaatatcgatgggtgtgggtggccgacatgggctcagtcgtcaagaggtgtacgggcggttgtggcttcttgggtgccgagcatgagggtgccagaatcctcgccggctgattcccagtcgacgatgacctggtcgccgtcaacgctggattcggcgatggtcacccattgcccgtccatatcgatgagcatcccggcggccagctctgtggcggcaaccgggtggggtgggctgtagaggaggtcgatgtcgcgggcagggtcgtcgggttcttcggttacctcgggtggggtcgatctggctgtctcggtgtcgtcggccaggtcggctcccaggatgcgttcccattcggggctggttttcttgcccgatgaggccatcgtctcgtcgatctgttcgtcagtgggccacacaaatttctttttggtccaggtcgtggtgtcgggtcgcagctgatccagcagttccaggtcttgcggggagtgggccttgcgggggtcgggggtgtagaagaattggacttccttgggggctgattcgccggataggtaggtgcctcggccgcgtttgccgaacgggatgcccacgccgacgtgttcggagccgaacatcatgcgggctccgtcagcagacaggggtccggtggcggcacgcccggagaagttgtctcggatttcgccgcccaggaactcggcgtcggggcgttgggtccccagatcgacgtggatacggcaggcggctgccatgcgcagcagggagccgatccagccgaaaacggggcattctccgggcatcccagagaccttgatcgttgaccaccagtttttcgcgttgccgtagaactggcggtactcgtcgatgaggaccagcacgcgggtgaagtcggtctcgcgggccccttcttcttcgatgcggcggtagcggtcctccatgagagaccacagccagtggatgagggcgacctggtcggggacggtagtggcgaccatctcgatgttgggccactcccgcaggcccaggtactcgatgcgtttagggtcgatgacgaagacgcgccagttgcggcgggcaccctcgacggcgtcgccgatcatggacaccgtttttccggtacgggtgcggccggccttgagctggtgggccatgacaccggagatgtcccagaaacaggtgttgccgtcctcgtcgacggcctgggggattttctcccagtctggggagtctgggcccggaagggccacgggtcggggcaccatcgagggcagggggtggcggcgggtgacggtgatggtgtcgtgttccaggtcgaagtcgctgcgccactggccgagcatcatcgccgaggtcaccgcggccaggcgcaattggatgttcgggctggacaaatgggcgccacgttggtggtgaatggtgaagccgtccaggttcccccgatcggttttccaggaatcgacggtgaccgccgacccatagatctgagtggctacttctttagcccgttccttgtctcggtccagatcggttttgtcagggtcaggggtcggggcgcggtattgcaggacgaaccggccggccgggatcgttgcggatgtcaccgtgaactctgccggcgaccaggcagccgcggccgcctgggtgagggccattggcatggtctcgacggcagcctcttcgggggggatggtgagggtcaggcgtcgcggatgcgtcttcttgcgattccatgtgactttctgcctcaccggcaccttcgccgccgactgaatggctaggcgagctgattcggcagtttcggtacgccggccagcgcgtagcgcccgtcgtgcgtgaaggctgcccaccacagcacagcccatacacggcagccaccagcgcggatcagcggctgctgcatagcccccggtagctagtaccgcacctgaccagccggccgcgatacttttccacgccggtttcgcgccaccaggaccagcgttatggacggtctgcttcgaggctgcggagggacgagacagcggagtgctggtcatgccgcggcctccttgtggcaggtcatttcacaggcatgccggccagcgatgatgccgtggcgcaccgccccggtagccgcatagaccgcgcacaactcaaacacggggcacccatcgcaggccgccgggttcatgctttctttgtcccacgatggtgggtcatcggtgcacggcacggccaggccatcctgttgagcggcgctgatagcggtgaataggcgcagctgggcgcgaacttggtctggggtcaggttgacggtgcgggctacacgcatggggttccttcctcttcaccagtgaaggttccctagacccggccgatgtgcggagagatttcagtgttttatcgaggtgaccagccatccggtctgcgctgcgggttcaggtaccagggtcagatgcaccacggtgtggtcggctaggggcacggcgaccaggggcccgtcggcgctcgccccggtgagggtgggagttccggccacggtggtggcaggaatctggttgggtttcgcggccatcagggagcccatgagggtcggtgcggcgatctggacgagggcgactttgcgggcggcgggatcgcgggtcaaccagccgcgggtgaaagcgagcgccgccgacgtgatatcggggctcagcggggctggagtggcggctgggtgggccgttgaggagggccacacgcgcggtagcg

SEQ ID NO: 227 - DNA, 1095 bp, Propionibacterium acnes
acaccgatcaagcggcctgtatcggcagcattgccgtacctctgcccggcctgatcctcaagccacgacaacgcatcccggaacaaccgcacgtcctccagggctaaaccgcagtcgtagccgcccttgtcccccaacctcacaatctggcgctcccggcgtcctcttttgtcgacctcgatccacagtttcgcgtgcatccgctggcctcggccttctgacaggatctcggtgagcaggtcggacgcctgccctcgcgcatcctcgttactgcgggggaattggagtatgtgggaggaacgacgatggggaaggttggtgacctcatggcgcagcaggttgcgcttgcgcatctgctgatcgagacgctcgggctgacctgttgacggggttgagccgtggcgccgcttcctcggcggggtctcgatccgttgctcttccggcggttcggcgtcaggttgtggtgcgcgatctcccctaggacgggggggctcgccacctatatccgagggacgatgagacggccttccacgcttgctgcgcactttcgcagcccgccccttgcggtcacatcgacgcggcggcggagtgacgtcctcaccgcgcgctagctgcgtcaacgccgacaccaggttggtgcccggtttcagcccttttagcacgaaccgcaccaggcgggggtctcggccgattcgtcgggcaatctcggcttggctccacccctcggctaacagggggcgcaacaagtcttgggcccggttatcacgctcagtcactggtcgccccctcggggagtcctgcctgctcggcctgctctgatagagcagcccgttccgatccggtctggggcgctttcaggggaccgggtaggacacctttgacacgcagccgcccgtccttgccgtcatcgccgcccccctgggccacagggagcgcccaggggggcacgttgctggtgtagatggcgtcgccgtggatagccagcagggtgcgggagttcatgcgtagtgctcctcccttggttgtggcgttttttccggtggtggggtcggcgatgggtgtgttgagggtgcgtacgcgggacagggcccagat

SEQ ID NO: 228 - DNA, 718 bp, Propionibacterium acnes
ccggggccctgctgctggtgtgggacgtcaccgttttgaccgggcccactctcggccaccgcgtgcgtcctctcagtaaggacgccgagctgactgcccggcgctggctcgaccaggtcgccgacaaccccggcttcctcgacacccttatcgaggccgcccgcatcaccgatggatggcatcacgcgacgcctccgcacattcaggccccttaccggacccttcatcagtgaacggaggtacaacgacatgaccagcgacattgacattgaccggacccacaaacccgacgaccgcgccgaggctcctctttaccggtcctgggccaggagactcgtgcacgtctccgggatgccctggcgtatcgtcgccgccttggccggggtctcccccacctccatgcaccggcttctattcggccgcaacggtcgacccgtggaatggatcggcatcaatgatgctcgcgccctgatggatatcggcatcgatgatctcgcctcagcgtccaccgaccgtatcccggcccgcgaatcccgcgagctgttggtagccctgcacaccctcggctggaccgatgagcatctaagccgctggctgaccagttccgacctcgacctggccaccacccccaaggccctctacgtcacccggctatccgccgcccgcatccaggccacctacgacatgctcatcagccagcccgtccgccgctgcggcc

SEQ ID NO: 229 - DNA, 7861 bp, Propionibacterium acnes
tttgtccacccacccctgtcgattttgtccgccaagtattagacaaaccattagacagtgaattagaccctgggtcgcgtcagcgtgtgaactcaccaacgcgcgcgcgcgcggcggccgagccgccgaagccaaagaaacccataccaccaacgcctgaaccagcagcccccgcttcagacagtcctgtgtcagcgcacgctgatgaggctgccgagttggcgtggcagttcgtggggtggtgtcctcagctggtaggggcaccgaagaaggtgcgtggccagctccgccagatggtcgctgccgagatccgccggaatccgggctggctggatgcgccagcgttggaggttgttgcccagcgggtacgtgctgaaggtgcgctgggggtccagcactgtgagattgtgcgagccgagctgcacggggtgatcgccgaccagaaggccgcccccgcccgccccgacgccctgcacgcgcgggagcccaagtggtgggacgacgtgtactacgaaggaaacacaaccgtgtggtacgactctgacgaaaccagtgacgacgacgaggcgtggaaccggtcgcaggtatgtcatgttgctgagcgtgacgacatggctggcgggattgctaccaacctgctggcctcccacgctgatgatccgatggcctggctgactcgccgtcaaaccatgctgatggctcgtttcccccacgcccagaacgaggtcatcgcgatgtgccacatcgtgcgcaccgccctggaggccgacatggccgccggaacccggtgggaggactgatgagggtctcccggcgcgccctcatggccgtggcccgtgccgacgctgccgcagcagaccatgccaccggccgatgggtggccacagccaacgccaccgtcgcccggctgaccggactgtgcgaacgcaccgtccaatacgcccgcgccaccctggtccacctgggcctgtgccgcgtcgtggccaccggccgctacctcaccgccgacgagcggcgcacggctgctcgcacccatggcggccgccagatgcgcgccgcctccacccgcgtcctcaccatgtcctgcgcaatcgtttgcgccctaccccgaaggggtcaccactacaggaaagttaagttcctagatggtcaccaacgcacgcgcaggcgcgtgcgaaggccagcaacaccagagaagaaacccctgtggctgcaaaaactcgcagccctcctcgaccagcacctgccctggctggtgagaaaccatcacatcggccgactgtgccacgccctcaccgccctgggcatcgacgaacactggcaacccgcagacctcgacgccctcctcgacgccatgaaccgcaggaaccgtcgcctcggcctcgacgtgccatgcgccgacgaccagcacaaccccttgggactgttcatccatcaggcccgagacaccctcacccacgacaacccccatgaacgccgcctagcccgtgacgctgaacgcgcccggctcatcgacgaccaactccgccgccgcgcagaaaccgccacctgcgcagcccgcctcgcagccgagcacgccgaccccgactaccagacccgccgtcgtgaacgcagggaaaccctgcgagccacactcagggccgcccagcagcatgtcaggacacactgatacccgctcatacgcacaccatgaaacacgacaagccacctgacagtatcagctgcaagacgcatgacaacatagaaggacatgatgaaatacacatagacacaaccccgcacagcagtttcgcaacaaatcatgatagtctcatggcagtatcgcttgatacacacatagcatcactcccacataggcagttatgctgatatactcctactaggttatccgtccaacatgctgagtgggttcctgtacagcatgaaaggagcatggcatgatatgggccgttctcaactgcaagggtggtgtcggcaagacgaccagtgccctcctgctggcggcagccgccgccaagcagggccacaccaccctggtggccgacgctgacccccagggcaccgcatcccagtggtcagccctggcaaccaaaaacgacgaacccctgcccttcccggtgcaagcggtcaacatcgccaccatggaggcactgcccaccaccaccgacgcccatgatctcatcctcgttgacacacccccctcggcaggcgatctgatgttccaggcatgccgcatcgccgacctcatcatcatccccaccgccacctccggacccgacatctcccgaacatgggtcaccatggacgccacacaaggcacaccacgcgcgatcctcctcacccaaaccgaacacaaccgtgtcgtctaccgccaagctcgcactgccctcgccgccgacgacaccgtcgttctcctggaccacgacatcccccgccgtgaatccatccgcacagcatggggcaccaaccccccagacgacgtcatcacctactacctgcccgtcctcaacgaactcatggaggccctgtcatgaccaccaagaaaaccgacccattcgcccgccagaaagcagcagaagaccgcgcccaccaactccaagacgaagcccaacgccacgcccaccccaaacgcgtcatcggccccaccgcacgattccagttcgtcctgccagccgacgtgctcaccggcctcaaacacctcgccctcacccgcggcaccaccgcccgccaactcaccctcgacgccctcgacaccgcctacggcctcgacaccctcgccaacagcgggaagaaaacccacccatgacccgtgggtccccctgccaccaccccctcgacggcaactgtgtgcgagccacaggcccgcacacaggcggcagcccagtgccgtccccgccaggaaaggaactgaacttttctggagtgctggctccctatcaccccttatggtgctatcagatccagtagcgccagcccgagaggaaacccatgagctacatcgtccgcaccggaaatctagccggcacccccgagctgcgcgaggggtagccgacacggcggaccgtgcccctgacagtaagcggcactactggagacatcaccatgaccgctcagatcctcgccccgtgcaaccagaaggctgccgtcatcgaaggagccctgccatgaaccaacctaccccccacaaggccgacgagtcacagacgagcaacaccacgaggaagtggcggcacaaggtgtcgttctaccaagacccggccgacaccgaccgagtccgcggagcgatcctccacaccatgacaaccgaaggcaaccggaacctgagccagttcgtcaacgatgccgtcatggccaaggtgaccgaactggaagcaaaatacaaccacggcgagccattccccgccgtgggagcccgaggactcccccagggcggcgcagccgccaacagataagagggcggggaccaccaatagcagtcgatttcggatccagatcgggtagacaggacccatgatgaatttcatatcctccctgctctcggccatcctgaccctctttgcgatggtagccgtggcgataggagtggtgaacattgtgccgggaatatgcgccatcatcggtgcacggaaatacggcgaccaggaccgtgtgcgggcaggacaacgaaagatccttcttggtgctatcgccttggtggtagcagtaggcattcacccgtgacccacggttaccggaagccccgccgcaatcgataccactgtcagtaccatcaggggcgataggggtcaagctctccttgtcacaatcccttccccggcagcccagtaaccgtcgcttacagccatacatggatatgcgcccattcgtcggcaccgacgccgtgcgggttggcgacgctgacccgtctgctcacaaacgacccttccagcccagcaccacccactacaccgacacgatccacgaagctgaaaccgaacctcccatccccgtccgaaacatcaacgaactcatcaaccccaccaaccatgcatgaacgcacgatcgcctaccggccagccttcctgcgcgacgtgaagcggctcaaaaacaagcactacaacatgaacacacactcaaatgggcggtaaggtcacgaagtcgacgtggctgcctcacggatggcttcggcgagctcttggggtcgactccacatgggccagtggccggttggcagatccatcgcggtgaagttggtcaggtgcgcgacggcgctgaacatcggattgcctgctgcggccagctcgaggacctggacgctgggaatggagcagcagatcaacgtggttagtacatcatggcgagcgctattggacagcgcgacccgtgcccgggccacttgcgcgggttcaggaaccgcccgtgcccggaaccggtcaaggtgctcgttgctgaggccctctaaactggcctgcttgccgagagtatcgaagtcaggaagtggcagctcagctgtttcctcaggtagatctggtgcgaaggcacctccatcgctcatgggaccggagtccacccagacgatccgatggaccaactctgggtgcctgtctacaactaggctcaccggcccgttcgcgccactgtgtcccaccaggaccgcatcgccgcccatctcgtccaggatggctgagatggcgtcagcttggtcgtcgagcgtgcgcgtagtgcgctgggtgtcctccggatcgaggccaggcagcgtcagccccacggctcgactgccagcagtgttcaataactcgactacctcgtcccaagcccaggctccgagccagtaaccaggaacgaggacgataggccgatgctggtcaggtcgcgatgttgaagtcatggagacatagttgcacagtgcgcggacaagggagtggcactatttctggcatgaatttagatctgggtgtccggtgaggcgatcagaacgcctccatgtactgtccgagtgtctacgatgcagcggacacagtcgagcagctggctcacaagtttccaggtgtccttctgcccctatgagggaagtcggctgctctcgcaacctttgagggctgctctggggtcggaaccagttacagatcgttcaagttccgggaactaccgccggtcacgctgattgattcccgggcgatctcgcttctgacgacagtggtcggtaaccgagaggcgtcctactctgaccccgctgctgcggtgagtaaatcacgggcgtcccggatccggccacccgtccaagtgccagccagcttgatcggctaggcatcgtcaaggagcgacgatgaggtgatgatgcgatgtgagcgcaccgcgaagtgaggtataaagaagccttcccgggcgcatgcgtcgcccaggaaggccaggttggcccctggacggctgaatggttgggcggatcaggctgtagcggagacgtgcagtacctcgtaggcgatggcgttggttgggctctggtctgcatcgtggctactgagttcgacgaggatgacggtccaggtggtgatgtcgacggcggtgacgcgggcgatggtggaatcagtggatgctgcaaggaagtcggcggttatgtcttcgatgcagtgggacggagcagtgctggtgggcaggggcacggtcttgacggtcaggcttcgggcagcagagtaatcggcggttccgttaacaagctggtggacggtccagtcctggatcgggtgccggccgaagtcgcgtacgatagccgagtaaccaagttcgccccagcagaactggcgcatcccctctatgtcgcgccagacgtagaagggcgcgtaggagttctggggtgcgcctttgaccttttcttggatgaggtaggccttgaactccagtccatggtagccgtccatgaggtgtccagtctggatgacgcggtcgcggatgatctgcatgtcatagtcggtgggcagggtgatctgatattgcatggcgtacatcagcggttctccttggtttcgtgggagtaggtcgtggggatgacgggttcctgccaatcgatggttgacaagtcgtcggcggcttgttggtaggtaaggtggatcattggctgtttgagtgcagcgccatgccagtgtctctggccggcgtcgatccagatggattcgcccttggtcaggtgctggggtgcttgtccttcaatatggaccagggcaacgccgcccgtgacgtagaggccctgtcccttggggtgtgtgcctcagcggcaaacgtgacggcgtgggcggcacgcccggcgtcttccgtggcacgatcggccggatccatggcggcgcgcagctgctgttctgcagccaggcgtccaggtcacggcgggcagcatcgacacccagggcagcctcgacggcttcagggctacgacgctggccgggctggttgaccgcagaccactggtgccgggcgtcgtccagatcatggccggcggcgtcgatgagggcggtggtggcttcggcgcagcatcgcctgatccactccgaacgtgacaggccagctgtctcggcggcactgtcaatgcgcgccaggagagatttcatgggcgctcatctgtagcctccagataggcgttgatgtagcgcagagcctgatccgtcatgtcgatggcggctgcctcggcagacgacacaacgggctgtggatgataagaccacccaacatagacggcgaacatcaatttctcgacagctttcatgaggtccccggcggcaaccgcatccgcctcatcatccgaggagaaccacttcaggtctgaacggctgtacatagcccctaggtcctgatgtgggtcgaggtccttggaatgatggaagttcctacacacccatcgccaaagacctcaacatggacaacgctaccttcaccactccctcatctgtgaagagccagtttatgcacggtgttgaaagaggcgtcggtctacgacgaatgcgggttaatggtcttgcggtgtggggcgctgggcgatggcatcgagaacgcgtgagtgggtggcgatccattcggccgcgtcggggttgatgttgcgggcgacggtgtcgatcgctgttacgtagtgggcaagcctgcgaatctcagcttgttggtcagggtgatcgctgatgagaggctcttgatgggaggcgcggttacggacgtggcggatgagctccacgttttcctcgaagtcgcgtcggctacgccccgggtagtgaggcatacctccgttacgtaagtcagtgagagctttccatacggttgcttccaggcgcggggtgagcagaaagcgccagttgtccagtgacagactcgccacgatctgatcaggggtcgcatcgagcctcgcgcgccgcagtcgcttctcggccctggcgacgttacgcgggaaaccaccgagccgatagctcggggattcccaccaacgccgtatgccagtatcggcgctcaggcgcacgtcaatgaagtttctcaggagtacctcgacatggctgatgtcttccaagaacgctttcgagatgcgggtgttccacacgtaccacgcatcgactggttcgatccggtagcggctgagcctggcgggtgagaaccactcctgcaacgtctcacgactcaccgtgggagcgtggtaggattgatgacgataggcctcgggaaggtcaatgccgcgaaatatcggtatacccccgaggtcattgttttgcccaggcccctcctcgcatacttgcggggcgtcattggctgccgtcatctcgtctcttcccggtacgtggctgtccatgttcacgggcaggtacggcaatgaggttcccgcacacaaacctctaccaagcatacgctggcaagcccc

SEQ ID NO: 230 - DNA, 7938 bp, Propionibacterium acnes
tttgtccacccacccctgtcgattttgtccgccaagtattagacaaaccattagacagtgaattagaccctgggtcgcgtcagcgtgttagctcaccaacgcgcgcgcgcgcggcggccgagccgccgaagccaaagaaacccataccaccaacgcttgaaccagcagcccccgcttcagacagtcctgtgtcagcgcacgctgatgaggctgccgagttggcgtggcggttcgtggggtggtgtcctcagctggtaggggcaccgaagaaggtgcgtggccagctccgtcagctggtcgctgccgagatccgccggaatccgggctggctggatgcgccagcgttggaggttgttgcccagcgggtacgtgctgaaggtgcgctgggggtccagcactgcgagattgtgcgagccgagctgcacggggtgatcgccgaccagaaggccgcccccgcccgccccgacgccctgcacgcgcgggagcccaagtggtgggacgacgtgtactacgaaggaaacacaaccgtgtggacgtacgactctgacgaaaccagtgacgacgacgaggcgtggagccggtcgcaggtatgtcatgttgctgagcgtgacgacatggctggcgggattgctaccaacctgctggcctcccacgctgatgatccgatggcctggctgactcgccgtcaaaccatgctgatggctcgtttcccccacgcccagaacgaggtcatcgcgatgtgccacatcgtgcgcaccgccctggaggccgacatggccgccggaacccggtgggaggactgatgagggtctcccggcgcgccctcatggccgtggcccgtgccgacgctgccgcagcagaccatgccaccggccgatgggtggccacagccaacgccaccgtcgcccggctgaccggactgtgcgaacgcaccgtccaatacgcccgcgccaccctggtccacctgggcctgtgccgcgtcgtggccaccggccgctacctcaccgccgacgagcggcgcacggctgctcgcacccatggcggccgccagatgcgcgccgcctccacccgcgtcctcaccatgtcctgcgcaatcgtttgcgccctaccccgaaggggtcaccactacaggaaagttaagttcctagatggtcaccaacgcacgcgcaggcgcgtgcgaaggccagcaacaccagagaagaaacccctgtggctgcaaaaactcgcagccctcctcgaccagcacctgccctggctggtgagaaaccatcacatcggccgactgtgccacgccctcaccgccctgggcatcgacgaacactggcaacccgcagacctcgacgccctcctcgacgccatgaaccgcaggaaccgtcgcctcggcctcgacgtgccatgcgccgacgaccagcacaaccccttgggactgttcatccaccaggcccgagacaccctcacccacgacaacccccatgaacgccgcctggcccgcgaacaccaccgcgcccaactcatcgacgaccaactccgccgccgcgcagaaaccgccacctgcgcagcccgcctcgcagccgagcacgccgaccccgactaccagacccgccgtcgtgaacgcagggaaaccctgcgagccacactcagggccgcccagcagcatgtcaggacacactgatacccgctcatacgcacaccatgaaacacgacaagccacctgacagtatcagctgcaagacgcatgacaacatagaaggacatgatgaaatacacatagacacaaccccgcacagcagtttcgcaacaaatcatgatagtctcatggcagtatcgcttgatacgcacatagcatcactcccacataggcagttatgctgatatactcctactaggttatccgtccaacatgctgagtgggttcctgtacagcatgaaaggagcatggcatgatatgggccgttctcaactgcaagggtggtgtcggcaagacgaccagtgccctcctgctggcggcagccgccgccaagcagggccacaccaccctggtggccgacgctgacccccagggcaccgcatcccagtggtcagccctggcaaccaaaaacgacgaacccctgcccttcccggtgcaagcggtcaacatcgccaccatggaggcactgcccaccaccaccgacgcccatgatctcatcctcgttgacacacccccctcggcaggcgatctgatgttccaggcatgccgcatcgccgacctcatcatcatccccaccgccacctccggacccgacatctcccgaacatgggtcaccatggacgccacacaaggcacaccacgcgcgatcctcctcacccaaaccgaacacaaccgtgtcgtctaccgccaagctcgcactgccctcgccgccgacgacaccgtcgttctcctggaccacgacatcccccgccgtgaatccatccgcacagcatggggcaccaaccccccagacgacgtcatcacctactacctgcccgtcctcaacgaactcatggaggccctgtcatgaccaccaagaaaaccgacccattcgcccgccagaaagcagcagaagaccgcgcccaccaactccaagacgaagcccaacgccacgcccaccccaaacgcgtcatcggccccaccgcacgattccagttcgtcctgccagccgacgtgctcaccggcctcaaacacctcgccctcacccgcggcaccaccgcccgccaactcaccctcgacgccctcgacaccgcctacggcctcgacaccctcgccaacagcgggaagaaaacccacccatgacccgtgggtccccctgccaccaccccctcgacggcaactgtgtgcgagccacaggcccgcacacaggcggcagcccagtgccgtccccgccaggaaaggaactgaacttttctggagtgctggctccctatcaccccttatggtgctaccagatccagtagcgccagcccgagaggaaacccatgagctacatcgtccgcaccggaaatctagccggcacccccgagctgcgcgaggggtagccgacacggcggaccgtgcccctgacagtaagcggcactactggagacatcaccatgaccgctcagatcctcgccccgtgcaaccagaaggctgccgtcatcgaaggagccctgccatgaaccaacctaccccccacaaggccgacgagtcacagacgagcaacaccacgaggaagtggcggcacaaggtgtcgttctaccaagacccggccgacaccgaccgagtccgcggagcgatcctccacaccatgacaaccgaaggcaaccggaacctgagccagttcgtcaacgatgccgtcatggccaaggtgaccgaactggaagcaaaatacaaccacggcgagccattccccgccgtgggagcccgaggactcacccagggcggcgcagccgccaacagataagagggcggggaccaccaatagcagtcgatttcggatccagatcgggtagacaggacccatgatgaatttcatatcctccctgctctcggccatcctgaccctctttgcgatggtagccgtggcgataggagtggtgaacattgtgccgggaatatgcgccatcatcggtgcacggaaatacggcgaccaggaccgtgtgcgggcaggacaacgaaagatccttcttggtgctatcgccttggtggtagcagtaggcattcacccgtgacccacggttaccggaagccccgccgcaatcgataccactgtcagtaccatcaggggcgataggggtcaagctctccttgtcacaatcccttccccggcagcccagtaaccgtcgcttacagccatacatggatatgcgcccattcgtcggcaccgaagccgtgcgggttggcgacgctgacccgtctgctcacaaacgacccttccagcccagcaccacccactacaccgacacgatccacgaagctgaaaccgaacctcccatccccgtccgaaacatcaacgaactcatcaaccccaccaaccatgcatgaacgcaagatcgcctaccggccagccttcctgcgcgacgtgaagcggctcaaaaacaagcactacaacatgaacacacactcaaatgggcggtaaggtcacgaagtcgacgtggctgcctcacggatggcttcggcgagctcttggggtcgactccacatgggccagtggccggttggcagatccatcgcggtgaagttggtcaggtgcgcgacggcgctgaacatcggattgcctgctgcggccagctcgaggacctggacgctgggaatggagcagcagatcaacgtggttagtacatcatggcgagcgctattggacagcgcgacccgtgcccgggccacttgcgcgggttcaggaaccgcccgtgcccggaaccggtcaaggtgctcgttgctgaggccctctaaactggcctgcttgccgagagtatcgaagtcaggaagtggcagctcagctgtttcctcaggtagatctggtgcgaaggcacctccatcgctcatgggaccggagtccacccagacgatccgatggaccaactctgggtgcctgtctacaactaggctcaccggcccgttcgcgccactgtgtcccaccaggaccgcatcgccgcccatctcgtccaggatggctgagatggcgtcagcttggtcgtcgagcgtgcgcgtagtgcgctgggtgtcctccggatcgagacctggcagcgtcagccccacggctcgactgccagcagtgttcaataactcgactacctcgtcccaagcccaggctccgagccagtaaccaggaacgaggacgataggccgatgctggtcaggtcgcgatgttgaagtcatggagacatagttgcacagtgcgcggacaagggagtggcactatttctggcatgaatttagatctgggtgtccggtgaggcgatcagaacgcctccatgtactgtccgagtgtctaggatgcagcggacacagtcgagcagctggctcacaagtttccaggtgtccttctgcccctatgagggaagtcggctgctctcgcaacctttgagggctgctctggggtcggaaccagttacagatcgttcaagttccgggaactaccgccggtcacgctgattgattcccgggcgatctcgcttctgacgacagtggtcggtgaccgagaggagtcctactctgaccccgctgctgcggtgagtaaatcacgggcgtcccggatccggccacccgtccaagtgccagccagcttgatcggctaggcatcgtcaaggagcgacgatgaggtgatgatgcgatgtgagcgcaccgcgaagtgaggtataaagaagccttcccgggcgcatgcgtcgcccaggaaggccaggttggcccctggacggctgaatggttgggcggatcaggctgtagcggagacgtgcagtacctcgtaggcgatggcgttggttgggctctggtctgcatcgtggctactgagttcgacgaggatgacggtccaggtggtgatgtcgacggcggtgacgcgggcgatggtggaatcagtggatgctgcaaggaagtcggcggttatgtcttcgatacagtgggacggagcagtgctggtgggcaggggcacggtcttgacggtcaggcttcgggcagcagagtaatcggcggttccgttaacaagctggtggacggtccagtcctggatcgggtgccggccgaagtcgcgtacgatagccgagtaaccaagttcgccccagcagaactggcgcatcccctctatgtcgcgccagacgtagaagggcgcgtaggagttctggggtgcgcctttgaccttttcttggatgaggtaggccttgaactccagtccatggtagccgtccatgaggtgtccagtctggatgacgcggtcgcggatgatctgcatgtcatagtcggtgggcagggtgatctgatattgcatggcgtacatcagcggttctccttggtttcgtgggagtaggtcgtgggggtgacgggttcctgccaatcgatggttgacaagtcgtcggcggcttgttggtaggtaaggtggatcattggctgtttgagtgcagcgccatgccagtgtctctggccggcgtcgatccagatggattcgcccttggtcaggtgctggggtgcttgtccttcaatatggaccagggcaacgccgcccgtgacgtagaggccctgtcccttggggtgtgtgtgcctcagcggcaaacgtgacggcgtgggcggcacgcccggcgtcttccgtggcacgatcggccggatccatggcggcgcgcagctgctgttctgcagccaggcgtccaggtcacggcgggcagcatcgacacccagggcagcctcgacggcttcagggctacgacgctggccgggctggttgaccgcagaccactggtgccgggcgtcgtccagatcatggccggcggcgtcgatgagggcggtggtggcttcggcgcagcatcgcctgatccactccgaacgtgacaggccagctgtctcggcggcactgtcaatgcgcgccaggagagatttcatgggcgctcatctgtagcctccagataggcgttgatgtagcgcagagcctgatccgtcatgtcgatggcggctgcctcggcagacgacacaacgggctgtggatgataagaccacccaacatagacggcgaacatcaatttctcgacagctttcatgaggcccccggcggcaaccgcatccgcctcatcatccgaggagaaccacttcaggtctgaacggctgtacatagcccctaggtcctgatgtgggtcgaggtccttggaatgatggaagttcctacacacccatcgccaaagacctcaacatggacaacgctaccttcaccactccctcatctgtgaagagccagtttatgcacggtgttgaaagaggcgtcggtctacgacgaatgcgggttaatggtcttgcggtgtggggcgctgggcgatggcatcgagaacgcgtgagtgggtggcgatccattcggccgcgtcggggttgatgttgcgggcgacggtgtcgatcgctgttacgtagtgggcaagcctgcgaatctcagcttgttggtcagggtgatcgctgatgagaggctcttgatgggaggcgcggttacggacgtggcggatgagctccacgttttcctcgaagtcgcgtcggctacgccccgggtagtgaggcatacctccgttacgtaagtcagtgagagctttccatacggttgcttccaggcgcggggtgagcagaaagcgccagttgtccagtgacagactcgccacgatctgatcaggggtcgcatcgagcctcgcgcgccgcagtcgcttctcggccctggcgacgttacgcgggaaaccaccgagccgatagctcggggattcccaccaacgccgtatgccagtatcggcgctcaggcgcacgtcaatgaagtttctcaggagtacctcgacatggctgatgtcttccaagaacgctttcgagatgcgggtgttccacacgtaccacgcatcgactggttcgatccggtagcggctgagcctggcgggtgagaaccactcctgcaacgtctcacgactcaccgtgggagcgtggtaggattgatgacgataggcctcgggaaggtcaatgccgcgaaatatcggtatacccccgaggtcattgttttgcccaggcccctcctcgcatacttgcggggcgtcattggctgccgtcatctcgtctcttcccggtacgtggctgtccatgttcacgggcaggtacggcaatgaggttcccgcacacaaacctctaccaagcatacgctggcaagccccgacgagacgacgcctccgcccgccacaccaacggtcaccgccacggccacggtgaccgtgaccgtggcaccg

SEQ ID NO: 231 - DNA, 770 bp, Propionibacterium acnes
taggcgccccttcggggcacctgtaagcctgtattgctgcggtttacagccttggcacccaaaggggcggcaaggggccaggaggggtcattctgcgccgctgatggcatctcacatgtgagttattctctcaactatcctttaagtcaagcgtattagattatttatccagtactcttgacagtctgtctatcgggctatatatttataagcagaacgagagatcgggaaaggaatcaacgatgaagtacaccgcacacgtcaacatggtgaccaagccctacatcggacttcccactacccgaaccccctacaccctcgtcgacgccgactgggccacaacatggatgatcgacgaaacctacgaagcccactaccacggcaccagcatggagatcagcatctacggcgaaggccccgactgctccgtactcaccaaccgcatctacaccgaccagcccaccgatgtgaccgctgcactcgccggctacggcttcaccatcgacaccaccaacacatccaaaaccatcctcacgctcacccgcacagccaccatctcccacctactagccatcctcgatggcctaccccaagctgaggggactcactggctcaacactcaacccgacctccaccacatcaccctcgacgactccaccaccggctgggccaccaaccgcaccgacgacaccgacaccggcgtctgctacgacaccagcacccacaactggcagatctgctgacagcatgacgggcctgcccttgaaggg

SEQ ID NO: 232 - DNA, 504 bp, Propionibacterium acnes
ttcatgatcgcagtgcccgatacaaggtggagcggcccacaccaagctgggccgccaccttcgttttcgggacaccctcggcaacgaggcggcgagcgcgggcaagctggccctcgctcaatgccggtttccggcctcgatagcggccctgcttcttcgccaccgcgatcccctcggcctgtcgttcatggatcaacgcccgctcgaactcggccaaggcacccagcagatgcaacatgagctggctcaccggatcagcggaccccggcccatagacctgacccccttcaagggcaggcccgtcatgctgtcagcagatctgccagttgtgggtgctggtgtcgtagcagacgccggtgtcggtgtcgtcggtgcggttggtggcccagccggtggtggagtcgtcgagggtgatgtggtggaggtcgggttgagtgttgagccagtgagtcccctcagcttggggtaggccatcgaggatggctagtaggtgggagatggtgg

SEQ ID NO: 233 - DNA, 6850 bp, Propionibacterium acnes
attttgtccacccacccctgtcgattttgtccgccaaatattagacaaaccattagacagtgaattagaccctgggtcgcgtcagcgtgttagctcaccaacgcgcgcgcgcgcggcggccgagccgccgaagccaaagaaacccataccaccaacgcctgaaccagcagcccccgcttcagacagtcctgtgtcagcgcacgctgatgaggctgccgagttggcgtggcggttcgtggggtggtgtcctcagctggtaggggcaccgaagaaggtgcgtggccagctccgtcagctggtcgctgccgagatccgccggaatccgggctggctggatgcgccagcgttggaggttgttgcccagcgggtacgtgctgaaggtgcgctgggggtccagcactgcgagattgtgcgagccgagctgcacggggtgatcgccgaccagaaggccgcccccgcccgccccgacgccctgcacgcgcgggagcccaagtggtgggacgacgtgtactacgaaggaaacacaaccgtgtggtacgactctgacgaaaccagtgacgacgacgaggcgtggaaccggtcgcaggtatgtcatgttgctgagcgtgacgacatggctggcgggattgctaccaacctgctggcctcccacgctgatgatccgatggcctggctgactcgccgtcaaaccatgctgatggctcgtttcccccacgcccagaacgaggtcatcgcgatgtgccacatcgtgcgcaccgccctggaggccgacatggccgccggaacccggtgggaggactgatgagggtctcccggcgcgccctcatggccgtggcccgtgccgacgctgccgcagcagaccatgccaccggccgatgggtggtcacagccaacgccaccgtcgcccggctgaccggactgtgcgaacgcaccgtccaatacgcccgcgccaccctggtccacctgggcctgtgccgcgtcgtggccaccggccgctacctcaccgccgacgagcggcgcacggctgctcgcacccatggcggccgccagatgcgcgccgcctccacccgcgtcctcaccatgtcctgcgcaatcgtttgcgccctaccccgaaggggtcaccactacaggaaagttaagttcctagatggtcaccaacgcacgcgcaggcgcgtgcgaaggccagcaacaccagagaagaaacccctgtggctgcaaaaactcgcagccctcctcgaccagcacctgccctggctggtgagaaaccatcacatcggccgactgtgccacgccctcaccgccctgggcatcgacgaacactggcaacccgcagacctcgacgccctcctcgacgccctcctcgacgccatgaaccgcaggaaccgtcgcctcggcctcgacgtgccatgcgccgacgaccagcacaaccccttgggactgttcatccaccaggcccgagacaccctcacccacgacaacccccatgaacgccgcctggcccgcgaacaccaccgcgcccaactcatcgacgaccaactccgccgccgcgcagaaaccgccacctgcgcagcccgcctcgcagccgagcacgccgaccccgactaccagacccgccgtcgtgaacgcagggaaaccctgcgagccacactcagggccgcccagcagcatgtcaggacacactgatacccgctcatacacacaccatgaaacacgacaagccacctgacagtatcagctgcaagacgcatgacaacatagaaggacatgatgaaatacacatagacacaaccccgcacagcagtttcgcaacaaatcatgatagtctcatggcagtatcgcttgatacacacatagcatcactcccacataggcagttatgctgatatactcctactaggttatccgtccaacatgctgagtgggttcctgtacagcatgaaaggagcatggcatgatatgggccgttctcaactgcaagggtggtgtcggcaagacgaccagtgccctcctgctggcggcagccgccgccaagcagggccacaccaccctggtggccgacgctgacccccagggcaccgcatcccagtggtcagccctggcaaccaaaaacgacgaacccctgcccttcccggtgcaagcggtcaacatcgccaccatggaggcactgcccaccaccaccgacgcccatgatctcatcctcgttgacacacccccctcggcaggcgatctgatgttccaggcatgccgcatcgccgacctcatcatcatccccaccgccacctccggacccgacatctcccgaacatgggtcaccatggacgccacacaaggcacaccacgcgcgatcctcctcacccaaaccgaacacaaccgtgtcgtctaccgccaagctcgcactgccctcgccgccgacgacaccgtcgttctcctggaccacgacatcccccgccgtgaatccatccgcacagcatggggcaccaaccccccagacgacgtcatcacctactacctgcccgtcctcaacgaactcatggaggccctgtcatgaccaccaagaaaaccgacccattcgcccgccagaaagcagcagaagaccgcgcccaccaactccaagacgaagcccaacgccacgcccaccccaaacgcgtcatcggccccaccgcacgattccagttcgtcctgccagccgacgtgctcaccggcctcaaacacctcgccctcacccgcggcaccaccgcccgccaactcaccctcgacgccctcgacaccgcctacggcctcgacaccctcgccaacagcgggaagaaaacccacccatgacccgtgggtccccctgccaccaccccctcgacggcaactgtgtgcgagccacaggcccgcacacaggcggcagcccagtgccgtccccgccaggaaaggaactgaacttttctggagtgctggctccctatcaccccttatggtgctatcagatccagtagcgccagcccgagaggaaacccatgagctacatcgtccgcaccggaaatctagccggcacccccgagctgcgcgaggggtagccgacacggcggaccgtgcccctgacagtaagcggcactactggagacatcaccatgaccgctcagatcctcgccccgtgcaaccagaaggctgccgtcatcgaaggagccctgccatgaaccaacctaccccccacaaggccgacgagtcacagacgagcaacaccacgaggaagtggcggcacaaggtgtcgttctaccaagacccggccgacaccgaccgagtccgcggagcgatcctccacaccatgacaaccgaaggcaaccggaacctgagccagttcgtcaacgatgccgtcatggccaaggtgaccgaactggaagcaaaatacaaccacggcgagccattccccgccgtgggagcccgaggactcccccagggcggcgcagccgccaacagataagagggcggggaccaccaatagcagtcgatttcggatccagatcgggtagacaggacccatgatgaatttcatatcctccctgctctcggccatcctgactctctttgcgatggtagccgtggcgataggagtggtgaacattgtgccgggaatatgcgccatcatcggtgcacggaaatacggcgaccaggaccgtgtgcgggcaggacaacgaaagatccttcttggtgctatcgccttggtggtagcagtaggcattcacccgtgacccacggttaccggaagccccgccgcaatcgataccactgtcagtaccatcaggggcgataggggtcaagctctccttgtcacaatcccttccccggcagcccagtaaccgtcgcttacagccatacatggatatgcgcccattcgtcggcaccgacgccgtgcgggttggcgacgctgacccgtctgctcacaaacgacccttccagcccagcaccacccactacaccgacacgatccacgaagctgaaaccgaacctcccatccccgtccgaaacatcaacgaactcatcaaccccaccaaccatgcatgaacgcacgatcgcctaccggccagccttcctgcgcgacgtgaagcggctcaaaaacaagcactacaacatgaacacacactcaaatgggcggtaaggtcacgaagtcgacgtggctgcctcacggatggcttcggcgagctcttggggtcgactccacatgggccagtggccggttggcagatccatcgcggtgaagttggtcaggtgcgcgacggcgctgaacatcggattgcctgctgcggccagctcgaggacctggacgctgggaatggagcagcagatcaacgtggttagtacatcatggcgagcgctattggacagcgcgacccgtgcccgggccacttgcgcgggttcaggaaccgcccgtgcccggaaccggtcaaggtgctcgttgctgaggccctctaaactggcctgcttgccgagagtatcgaagtcaggaagtggcagctcagctgtttcctcaggtagatctggtgcgaaggcacctccatcgctcatgggaccggagtccacccagacgatccgatggaccaactctgggtgcctgtctacaactaggctcaccggcccgttcgcgccactgtgtcccaccaggaccgcatcgccgcccatctcgtccaggatggctgagatggcgtcagcttggtcgtcgagcgtgcgcgtagtgcgctgggtgtcctccggatcgaggccaggcagcgtcagccccacggctcgactgccagcagtgttcaataactcgactacctcgtcccaagcccaggctccgagccagtaaccaggaacgaggacgataggccgatgctggtcaggtcgcgatgttgaagtcatggagacatagttgcacagtgcgcggacaagggagtggcactatttctggcatgaatttagatctgggtgtccggtgaggcgatcagaacgcctccatgtactgtccgagtgtctacgatgcagcggacacagtcgagcagctggctcacaagtttccaggtgtccttctgcccctatgagggaagtcggctgctctcgcaacctttgagggctgctctggggtcggaaccagttacagatcgttcaagttccgggaactaccgccggtcacgctgattgattcccgggcgatctcgcttctgacgacagtggtcggtaaccgagaggcgtcctactctgaccccgctgctgcggtgagtaaatcacgggcgtcccggatccggccacccgtccaagtgccagccagcttgatcggctaggcatcgtcaaggagcgacgatgaggtgatgatgcgatgtgagcgcaccgcgaagtgaggtataaagaagccttcccgggcgcatgcgtcgcccaggaaggccaggttggcccctggacggctgaatggttgggcggatcaggctgtagcggagacgtgcagtacctcgtaggcgatggcgttggttggggtctggtctgcatcgtggctactgagttcgacgaggatgacggtccaggtggtgatgtcgacggcggtgacgcgggcgatggtggaatcagtggatgctgcaaggaagtcggcggttatgtcttcgatgcagtgggacggagcagtgctggtgggcaggggcacggtcttgacggtcaggcttcgggcagcagagtaatcggcggttccgttaacaagctggtggacggtccagtcctggatcgggtgccggccgaagtcgcgtacgatagccgagtaaccaagttcgccccagcagaactggcgcatcccctctatgtcgcgccagacgtagaagggcgcgtaggagttctggggtgcgcctttgaccttttcttggatgaggtaggccttgaactccagtccatggtagccgtccatgaggtgtccagtctggatgacgcggtcgcggatgatctgcatgtcatagtcggtgggcagggtgatctgatattgcatggcgtacatcagcggttctccttggtttcgtgggagtaggtcgtgggggtgacgggttcctgccaatcgatggttgacaagtcgtcggcggcttgttggtaggtaaggtggatcattggctgtttgagtgcagcgccatgccagtgtctctggccggcgtcgatccagatggattcgcccttggtcaggtgctggggtgcttgtccttcaatatggaccagggcaacgccgcccgtgacgtagaggccctgtcccttggggtgtgtgcctcagcggcaaacgtgacggcgtgggcggcacgcccggcgtcttccgtggcacgatcggccggatccatggcggcgcgcagctgctgttctgcagccaggcgtccaggtcacggcgggcagcatcgacacccagggcagcctcgacggcttcagggctacgacgctggccgggctggttgaccgcagaccactggtgccgggcgtcgtccagatcatggccggcggcgtcgatgagggcggtggtggcttcggcgcagcatcgcctgatccactccgaacgtgacaggccagctgtctcggcggcactgtcaatgcgcgccaggagagatttcatgggcgctcatctgtagcctccagataggcgttgatgtagcgcagagcctgatccgtcatgtcgatggcggctgcctcggcagacgacacaacgggctgtggatgataagaccacccaacatagacggcgaacatcaatttctcgacagctttcatgaggtccccggcggcaaccgcatccgcctcatcatccgaggagaaccacttcaggtctgaacggctgtacatagcccctaggtcctgatgtgggtcgaggtccttg

SEQ ID NO: 234 - DNA, 6142 bp, Propionibacterium acnes
atctgctgacagcataacgggcctgcccttgaagggttggactctgcacccatttcagccgggtacgttgccggctgggcgaaggaagcagacggcgccgcgattgaagctgccgccgagcacgtcgcgaagacctcccacgcgattgccgaggcgttgcagctcaccgcacagtgagccccacggggcgaccggctcaccccggtcgcccctcaccccccgacaggggaaccgttcccgccgcctgaatctccatacccctgatacgtactacgcggggtcgaggagtggactcccccaccctcgtgtagtacactatactacacagtcattgaggatagaggtgacgtcatgagtttttcgatccgtttaaccgaccatgagcgccgcttagctgattcctacgcccgcctgcactcgcagtccctgagtgaggctttcaagcaagccctcttcgaccgcatcgccgacgagttcgatctgcaagtagcccgtgaggcactcaccgactacgcccgcgacaactaccagtctcgccccatcagcgagctatgggacgagtgtgacctatgagctggcagatcgaaaccacgagccggttcgataaagaattcaaaaagctagaccgctacacccaaaaactcattcacggctggatcacgaaaaacatcgacaacaccgacgatccccgccgccacggcaagcccctcaccggtgatctttccggactgtggcgctaccgcatcggcgactaccgcctcatctgcacactcaacgataaccgcctcaccatcctcgccctgtccatcggtcaccgccgcgacatctaccgataagccgttgcaagactgcggcgtcgacaccgccgggaccctggcccaggccttgggcctggaggaggacgagagcgaggagcacgccgcctgagcggtcgccggcacttcccataacagcaccggtcccggcggcccggccccgcgtctggtgctcggaccgatgccggcgcctggcctccgacgcccgccggggccagcggctgggctacctcgacgtcgacgtacaacgggccgaacgaaccgtgcgctgatttaccaccgcttccgcacagagaacatgcctctgactaggagaaatgacgttttccacagggcctctattactaatatccctattatctctatccacgcgcgcgagcctcagcgttcaagcttcaggtcttgctcgtctccctcgcgcctcgctgcgctcgttgctactgccgccccacccggcaagccgggtgggttgccatcggaataccgtggaccatcccggcgcatacacccagacggtccaagatccaatccacgctcacccgcgacgccgctaacgatcctcatacaccgtagatgccgttctgagagccttccagacccgcacgtgggtttattgcaccgagacccaaatcccctcagaagcgatcctgaaaccgtctacgccccatttccgacggacgctggacaggctgggcggcttgtctcccgccgcagacatggccctggcatatgcggttgccgactggtgggatcagggattggatcacacggcagacggctggtccaaggcgggtgtgcaggtgcggtgagcggcagacgtgaccggtggggtgcactgtcatggccgggcatctgccgagccaccatgcgggccctggaccaggaggcagcccgctgcgaggactgggggaagacggcggcacggatgggccgtcgggatgcggcggccggattcaccgagactgcggtgcagcatcgtggacagatgcaccacctcatgtcggcacaaaaagtgtgggtgtcgaccgacatggtgtcggctacactggacgccgcaggagacgtgccgagtttcgaggccgtcgacgtccctgccgccgggctcatgggtttggccagccccctgccgccggttaccctgcagcatccgctgtatctgcgcagcgacgagggtgtgacaaccttcactgatccggttctcgtcgacgcgctgggatggtggatggattctgggcgtgtgcacgtggtgatgtgcacacgcacaccccggctgcccaacccggtttatgcggtggcctccccactgacggtggtggagaaaatcacggtgcccaccggcatcgagttcgagaccatggagtccaggatcctgacccccggcggcgtgacaggcgtctcacggcagggcacacgcatgatgatccggttggcgtcatggctgggtgccgcgtgggtgctcatggcgactccgacggtgtcggagccgcaccctatggatggccggtggggaggcccagcaacggggcagacccggccgcgtgatcgggtgaccgtggtcgacatgcggcccatgaggcaggtgcacaccaccaccgaccccaccggcaggcggttgacgacccggcatgtcgtgcgaggacactggacacaccaaccctacggcccggcccgcagtctccgacgcctgcagtgggtcgccccattcatccgcggccccgaaggggctccgttcgtcggcaccgacaccgtcaccgtatggcgccgctagatacgcgggcgcggggggttgacgaacgatgcccccctctttgtgttgtgatcagtcgtgatcggcgggttttaggtcggggtaggtgtcgagaatggccttgaggacgaggtcttggattgtggtgtcattctgggctgccttgaccttcagtccaacgccgatgtcccgggggattctggtctgcaacttgaacaggtctgcctccttggttttgaacagtttggctgcagggttggcaacgggctgttcttggcgctggcgtccaaggttgcttttctttcgggcggtcatgacatcatctccaacagttcgtcggcaacatcggcgaagaaggcgatagtttccggctcaggggtacagccgtaggcgcgcttgatgacttgacgcttggggatgacgtgatcgaccaactgcgtctgggagtcgttggctagaaggtcgcgaccttccttgaacagggaggtattcggttcagctttggaaagcagcaccacgcgcggggttcctgcggcggcgtcgtgcgtctcccaggtgcgcgccatgtcgagcccggacgtgtcggtggggatgataaccagatcggcggcgcgaatggcggcggtgatgatgtcaccgttgcccggcggggtgtcaatgatgacaacttcttcgggtccggcgacgaggtgctggagcgtcgccttgttggccggttccacggggaaccccaaggggtcggcgttactcagtgtgcactcggcccaggatgatgctgacccttgagggtcggcatctttgacgcggaccatacggcccgtctcatggagagctgcagccagcaggatcgctgccgtggtcttaccgacgccacccttggcgttgataatgctccagatcatggtgacacctttcagtgaggatgcatatcagtttacctgcaaggagtaaagacggcaagcagttatgccgtttctgcggcaagccgtcttgcatccttggatgtatagatagttgtctacttatggttgtggatcgtggtgtctcgtaccaggatttagtgtgctcgctgatatgcacgactttcgggcggcctgatctggcggtggtgccactaacccaggagtctgatccgcaaggtgtcctcgactttgaggaaggggtctctgctttcgtgttgacctaaagtcaacggccctgggcgatcactgaatcctaataactttgtatccttccctgattgcatcttagcatccttgaattcaaacagggatggagccatgctgttttgacgacatggatgcactggggtttggttgttgccgatgcggagcgtcaggcggcccgggacgccgccaccgccgacacgctgcgggagatcgtgggactgctgggccggggcggcgaggtcccgcccgccaagacggggcgtaagacgaccggcaggccggccccggcccgcaagtcgtcggccacgcagtaaaggcagggatccgtccctacgcagagagcggaggcagatcctgggggatccgactcttcggttccgtgatcttcccggagatcttcccggatcccccagggctcatcctgatacggggtccgccgacggaccccgtatcagtgggggcgctgccaccagtgatggcgggcgggtcggtcggcgtctaggccccgcccgatggtcgcctggtctacctcgcaggcccgtgctgttgccgaggccgagaacgtctgcccacttgttgccgattcagtcccctctccgtctgccatgtcgccaacctttcctatctggcgtgctcatggacatgcccgggcacgccctcgctgctcagaggcctgctcgttccacctctggccgcgaaccgtatttctgctgaccactcctcgtgcgtgaatatttgccagccttggccattcatatttggactactctgcaccagatatcggactgggaaacctcttgcacatctctaattgtcatctattcgttgggcgcgcgctgttagatcgtgatcataccaatcagaagacaaagcgacgcccttttgagcggcttttcgaacgattctagaccgcgctatatcagcatttctaccgcgcggccagagtgctacactaaattcctctctgcaatccttaagtccattctttacttcctcatccaatttctgcgacagcatttttatggaagcatcgcactctgactcatcatcaaatgcctcaattgcgtgcgttcgccattcacggcgcgtattatcgtagccgtaatgaagtattacccaccgatccacagaatcatcgttaggatctacaactgtcatgaatggcccaactctcgctctggtgtattctcaattgcagttcagtgactttacttgaccagtcccggatttagtagacgtagacggagagtaccccgccgggaacttgactgacatcactgctgtaccgtactgctttcccgggtggcaaccatcgtaagcagcatttgccgtgacgtacctagtgctctttctctgagtgccggtaatcgccttatatggtacaggtgggtgaatcgtagccgttacggctaccgatgacacgtttgcatcacatgaagctgtggcgacataattagttgtcccattgacatgatgagagtcgtggacatactgtcgaggatcgagagtgcaggttattgttgacgccgttgttctggtaccagctgctttcgagctctttgttgcagttacagtctgcggccctgaaggttttactgacgcgactgatgtgttcgcgtgttttgcggcagtgctttgatttggttgtgcttgtgtagcagttgctgatgtcgccagtgatgcccccattaccatagctgtgattatggcgtagtctttacgcttcattgcgcccccaaataagcatgttagtttgctattttgaataggatacgagacatcgccatgacttgtcaagggcagaagtagaaagaatcggggggtatcaagaaagatgtgctttcatcaggacgaaagcggatgggtccgttcgacttggtgacgaatgatccggccttgcgtcgcggagaccaggccggcgagtttgtcgagcagggccgccgtggcctcatcgtcgggcacatcactaaagggacgaacaaccatgacggctagggccagaaacgaccggaactgaatcgcatgtggacccccatctggcaccaggcacacacctaccgaccggaaaccctgcaccctgtcgctcccagttcacctcctaatatgcgcctatagtctgtgctagtagacattattttgtgtgttgtttcccatctggcatgtctggccccggacccgccgcgacacgcggtggtggataacagaccaggacccccggaccatagagaccagggggacgagacagtcccccggtgaggatgtctcgatgtgcagatcaggaacagaatcgccgggcacgacccggcgccggtgccggtgcagtgaacccgtggcccatcgactccacgaacgaacgtctcgccttcctcaactggtgttggcggcaaggctactcagcagccatcgtggaa

SEQ ID NO: 235 - DNA, 5731 bp, Propionibacterium acnes
tgcgctgatttaccaccgcttccgcacagagaacatgcctctgactaggagaaatgacgttttccacagggcctctattactaatatccctattatctctatccacgcgcgcgagcctcagcgttcaagcttcaggtcttgctcgtctccctcgcgcctcgctgcgctcgttgctactgccgccccacccggcaagccgggtgggttgccatcggaataccgtggaccatcccggcgcatacacccagacggtccaagatccaatccacgctcacccgcgacgccgctaacgatcctcatacaccgtagatgccgttctgagagccttccagacccgcacgtgggtttattgcaccgagacccaaatcccctcagaagcgatcctgaaaccgtctacgccccatttccgacggacgctggacaggctgggcggcttgtctcccgccgcagacatggccctggcatatgcggttgccgactggtgggatcagggattggatcacacggcagacggctggtccaaggcgggtgtgcaggtgcggtgagcggcagacgtgaccggtggggtgcactgtcatggccgggcatctgccgagccaccatgcgggccctggaccaggaggcagcccgctgcgaggactgggggaagacggcggcacggatgggccgtcgggatgcggcggccgaattcaccgagactgcggtgcagcatcgtggacagatgcaccacctcatgtcggcacaaaaagtgtgggtgtcgaccgacatggtgtcggctacactggacgccgcaggagacgtgccgagtttcgaggccgtcgacgtccctgccgccgggctcatgggtttggccagccccctgccgccggttaccctgcagcatccgctgtatctgcgcagcgacgagggtgtgacaaccttcactgatccggttctcgtcgacgcgctgggatggtggatggattctgggcgtgtgcacgtggtgatgtgcacacgcacaccccggctgcccaacccggtttatgcggtggcctccccactgacggtggtggagaaaatcacggtgcccaccggcatcgagttcgagaccatggagtccaggatcctgacccccggcggcgtgacaggcgtctcacggcagggcacacgcatgatgatccggttggcgtcatggctgggtgccgcgtgggtgctcatggcgactccgacggtgtcggagccgcaccctatggatggccggtggggaggcccagcaacggggcagacccggccgcgtgatcgggtgaccgtggtcgacatgcggcccatgaggcaggtgcacaccaccaccgaccccaccggcaggcggttgacgacccggcatgtcgtgcgaggacactggacacaccaaccctacggcccggcccgcagtctccgacgcctgcagtgggtcgccccattcatccgcggccccgaaggggctccgttcgtcggcaccgacaccgtcaccgtatggcgccgctagatacgcgggcgcggggggttgacgaacgatgcccccctctttgtgttgtgatcagtcgtgatcggcgggttttaggtcggggtaggtgtcgagaatggccttgaggacgaggtcttggattgtggtgtcattctgggctgccttgaccttcagtccaacgccgatgtcccgggggattctggtctgcaacttgaacaggtctgcctccttggttttgaacagtttggctgcagggttggcaacgggctgttcttggcgctggcgtccaaggttgcttttctttcgggcggtcatgacatcatctccaacagttcgtcggcaacatcggcgaagaaggcgatagtttccggctcaggggtacagccgtaggcgcgcttgatgacttgacgcttggggatgacgtgatcgaccaactgcgtctgggagtcgttggctagaaggtcgcgaccttccttgaacagggaggtattcggttcagctttggaaagcagcaccacgcgcggggttcctgcggcggcgtcgtgcgtctcccaggtgcgcgccatgtcgagcccggacgtgtcggtggggatgataaccagatcggcggcgcgaatggcggcggtgatgatgtcaccgttgcccggcggggtgtcaatgatgacaacttcttcgggtccggcgacgaggtgctggagcgtcgccttgttggccggttccacggggaaccccaaggggtcggcgttactcagtgtgcactcggcccaggatgatgctgacccttgagggtcggcatctttgacgcggaccatacggcccgtctcatggagagctgcagccagcaggatcgctgccgtggtcttaccgacgccacccttggcgttgataatgctccagatcatggtgacacctttcagtgaggatgcatatcagtttacctgcaaggagtaaagacggcaagcagttatgccgtttctgcggcaagccgtcttgcatccttggatgtatagatagttgtctacttatggttgtggatcgtggtgtctcgtaccaggatttagtgtgctcgctgatatgcacgactttcgggcggcctgatctggcggtggtgccactaacccaggagtctgatccgcaaggtgtcctcgactttgaggaaggggtctctgctttcgtgttgacctaaagtcaacggccctgggcgatcactgaatcctaataactttgtatccttccctgattgcatcttagcatccttgaattcaaacagggatggagccatgctgttttgacgacatggatgcactggggtttggttgttgccgatgcggagcgtcaggcggcccgggacgccgccaccgccgacacgctgcgggagatcgtgggactgctgggccggggcggcgaggtcccgcccgccaagacggggcgtaagacgaccggcaggccggccccggcccgcaagtcgtcggccacgcagtaaaggcagggatccgtccctacgcagagagcggaggcagatcctgggggatccgactcttcggttccgtgatcttcccggagatcttcccggatcccccagggctcatcctgatacggggtccgccgacggaccccgtatcagtgggggcgctgccaccagtgatggcgggcgggtcggtcggcgtctaggccccgcccgatggtcgcctggtctacctcgcaggcccgtgctgttgccgaggccgagaacgtctgcccacttgttgccgattcagtcccctctccgtctgccatgtcgccaacctttcctatctggcgtgctcatggacatgcccgggcacgccctcgctgctcagaggcctgctcgttccacctctggccgcgaaccgtatttctgctgaccactcctcgtgcgtgaatatttgccagccttggccattcatatttggactactctgcaccagatatcggactgggaaacctcttgcacatctctaattgtcatctattcgttgggcgcgcgctgttagatcgtgatcataccaatcagaagacaaagcgacgcccttttgagcggcttttcgaacgattctagaccgcgctatatcagcatttctaccgcgcggccagagtgctacactaaattcctctctgcaatccttaagtccattctttacttcctcatccaatttctgcgacagcatttttatggaagcatcgcactctgactcatcatcaaatgcctcaattgcgtgcgttcgccattcacggcgcgtattatcgtagccgtaatgaagtattacccaccgatccacagaatcatcgttaggatctacaactgtcatgaatggcccaactctcgctctggtgtattctcaattgcagttcagtgactttacttgaccagtcccggatttagtagacgtagacggagagtaccccgccgggaacttgactgacatcactgctgtaccgtactgctttcccgggtggcaaccatcgtaagcagcatttgccgtgacgtacctagtgctctttctctgagtgccggtaatcgccttatatggtacaggtgggtgaatcgtagccgttacggctaccgatgacacgtttgcatcacatgaagctgtggcgacataattagttgtcccattgacatgatgagagtcgtggacatactgtcgaggatcgagagtgcaggttattgttgacgccgttgttctggtaccagctgctttcgagctctttgttgcagttacagtctgcggccctgaaggttttactgacgcgactgatgtgttcgcgtgttttgcggcagtgctttgatttggttgtgcttgtgtagcagttgctgatgtcgccagtgatgcccccattaccatagctgtgattatggcgtagtctttacgcttcattgcgcccccaaataagcatgttagtttgctattttgaataggatacgagacatcgccatgacttgtcaagggcagaagtagaaagaatcggggggtatcaagaaagatgtgctttcatcaggacgaaagcggatgggtccgttcgacttggtaacgaatgatccggccttgcgtcgcggagaccaggccggcgagtttgtcgagcagggccgccgtggcctcatcgtcgggcacatcactaaagggacgaacaaccatgacggctagggccagaaacgaccggaactgaatcgcatgtggacccccatctggcaccaggcacacacctaccgaccggaaaccctgcaccctgtcgctcccagttcacctcctaatatgcgcctatagtctgtgctagtagacattattttgtgtgttgtttcccatctggcatgtctggccccggacccgccgcgacacgcggtggtggataacagaccaggacccccggaccatagagaccagggggacgagacagtcccccggtgaggatgtctcgatgtgcagatcaggaacagaatcgccgggcacgacccggcgccggtgccggtgcagtgaacccgtggcccatcgactccacgaacgaacgtctcgccttcctcaactggtgttggcggcaaggctactcagcagccatcgtggaaacgatggacgccgcgggagcctacgaccacctcgacgacgaccagaccagcaaccagcacgactaacgccgctcccagcacgggggaaggcggcgcaccaggtgcgccgccttcccccgtgctggtgtctcgtcggcttactggtgggggtcgtaggggaacccgtaggtgtgttccagggccttgcggagaaggtcgttcatagttgtgtgttcggcgacggccttcatcttcagcgccgtgtgggtggcggtgggtagcttgacgttgaacgcggtgatcggggtcttggccgactggaaggtttcagagacactggctccctggctggccgccatttggtcggcgtaacggctggctttgtcggcggcggtgggtttgcggttcttactcacttcagcatctccttgattcggtcggcaacctgggcgaactctcctagatctgttggccgggttccgatggcttgccgataggcgacccgtcgatgaacctccgcatcgagaacgtctaggccctcaacggcggcggccccctcgtgggcatcacggtattgcctggtccaatcggctttgttgaagagcagggcccggcgtgtgccgtgggccacctggtaggtcattagcgctcggtccatgtccaggtcccccgactcggtcgggatgatg

SEQ ID NO: 236 - DNA, 5381 bp, Propionibacterium acnes
cacccacgacaacccccatgaacgccgcctagcccgtgacgctgaacgcgcccggctcatcgacgaccaactccgccgccgcgcagaaaccgccacctgcgcagcccgcctcgcagccgagcacgccgaccccgactaccagacccgccgtcgtgaacgcagggaaaccctgcgagccacactcagggccgcccagcagcatgtcaggacacactgatacccgctcatacgcacaccatgaaacacgacaagccacctgacagtatcagctgcaagacgcatgacaacatagaaggacatgatgaaatacacatagacacaaccccgcacagcagtttcgcaacaaatcatgatagtctcatggcagtatcgcttgatacacacatagcatcactcccacataggcagttatgctgatatactcctactaggttatccgtccaacatgctgagtgggttcctgtacagcatgaaaggagcatggcatgatatgggccgttctcaactgcaagggtggtgtcggcaagacgaccagtgccctcctgctggcggcagccgccgccaagcagggccacaccaccctggtggccgacgctgacccccagggcaccgcatcccagtggtcagccctggcaaccaaaaacgacgaacccctgcccttcccggtgcaagcggtcaacatcgccaccatggaggcactgcccaccaccaccgacgcccatgatctcatcctcgttgacacacccccctcggcaggcgatctgatgttccaggcatgccgcatcgccgacctcatcatcatccccaccgccacctccggacccgacatctcccgaacatgggtcaccatggacgccacacaaggcacaccacgcgcgatcctcctcacccaaaccgaacacaaccgtgtcgtctaccgccaagctcgcactgccctcgccgccgacgacaccgtcgttctcctggaccacgacatcccccgccgtgaatccatccgcacagcatggggcaccaaccccccagacgacgtcatcacctactacctgcccgtcctcaacgaactcatggaggccctgtcatgaccaccaagaaaaccgacccattcgcccgccagaaagcagcagaagaccgcgcccaccaactccaagacgaagcccaacgccacgcccaccccaaacgcgtcatcggccccaccgcacgattccagttcgtcctgccagccgacgtgctcaccggcctcaaacacctcgccctcacccgcggcaccaccgcccgccaactcaccctcgacgccctcgacaccgcctacggcctcgacaccctcgccaacagcgggaagaaaacccacccatgacccgtgggtccccctgtcaccaccccctcgacggcaactgtgtgcgagccacaggcccgcacacaggcggcagcccagtgccgtccccgccaggaaaggaactgaacttttctggagtgctggctccctatcaccccttatggtgctatcagatccagtagcgccagcccgagaggaaacccatgagctacatcgtccgcaccggaaatctagccggcacccccgagctgcgcgaggggtagccgacacggcggaccgtgcccctgacagtaagcggcactactggagacatcaccatgaccgctcagatcctcgccccgtgcaaccagaaggctgccgtcatcgaaggagccctgccatgaaccaacctaccccccacaaggccgacgagtcacagacgagcaacaccacgaggaagtggcggcacaaggtgtcgttctaccaagacccggccgacaccgaccgagtccgcggagcgatcctccacaccatgacaaccgaaggcaaccggaacctgagccagttcgtcaacgatgccgtcatggccaaggtgaccgaactggaagcaaaatacaaccacggcgagccattccccgccgtgggagcccgaggactcccccagggcggcgcagccgccaacagataagagggcggggaccaccaatagcagtcgatttcggatccagatcgggtagacaggacccatgatgaatttcatatcctccctgctctcggccatcctgaccctctttgcgatggtagccgtggcgataggagtggtgaacattgtgccgggaatatgcgccatcatcggtgcacggaaatacggcgaccaggaccgtgtgcgggcaggacaacgaaagatccttcttggtgctatcgccttggtggtagcagtaggcattcacccgtgacccacggttaccggaagccccgccgcaatcgataccactgtcagtaccatcaggggcgataggggtcaagctctccttgtcacaatcccttccccggcagcccagtaaccgtcgcttacagccatacatggatatgcgcccattcgtcggcaccgacgccgtgcgggttggcgacgctgacccgtctgctcacaaacgacccttccagcccagcaccacccactacaccgacacgatccacgaagctgaaaccgaacctcccatccccgtccgaaacatcaacgaactcatcaaccccaccaaccatgcatgaacgcacgatcgcctaccggccagccttcctgcgcgacgtgaagcggctcaaaaacaagcactacaacatgaacacacactcaaatgggcggtaaggtcacgaagtcgacgtggctgcctcacggatggcttcggcgagctcttggggtcgactccacatgggccagtggccggttggcagatccatcgcggtgaagttggtcaggtgcgcgacggcgctgaacatcggattgcctgctgcggccagctcgaggacctggacgctgggaatggagcagcagatcaacgtggttagtacatcatggcgagcgctattggacagcgcgacccgtgcccgggccacttgcgcgggttcaggaaccgcccgtgcccggaaccggtcaaggtgctcgttgctgaggccctctaaactggcctgcttgccgagagtatcgaagtcaggaagtggcagctcagctgtttcctcaggtagatctggtgcgaaggcacctccatcgctcatgggaccggagtccacccagacgatccgatggaccaactctgggtgcctgtctacaactaggctcaccggcccgttcgcgccactgtgtcccaccaggaccgcatcgccgcccatctcgtccaggatggctgagatggcgtcagcttggtcgtcgagcgtgcgcgtagtgcgctgggtgtcctccggatcgaggccaggcagcgtcagccccacggctcgactgccagcagtgttcaataactcgactacctcgtcccaagcccaggctccgagccagtaaccaggaacgaggacgataggccgatgctggtcaggtcgcgatgttgaagtcatggagacatagttgcacagtgcgcggacaagggagtggcactatttctggcatgaatttagatctgggtgtccggtgaggcgatcagaacgcctccatgtactgtccgagtgtctacgatgcagcggacacagtcgagcagctggctcacaagtttccaggtgtccttctgcccctatgagggaagtcggctgctctcgcaacctttgagggctgctctggggtcggaaccagttacagatcgttcaagttccgggaactaccgccggtcacgctgattgattcccgggcgatctcgcttctgacgacagtggtcggtaaccgagaggcgtcctactctgaccccgctgctgcggtgagtaaatcacgggcgtcccggatccggccacccgtccaagtgccagccagcttgatcggctaggcatcgtcaaggagcgacgatgaggtgatgatgcgatgtgagcgcaccgcgaagtgaggtataaagaagccttcccgggcgcatgcgtcgcccaggaaggccaggttggcccctggacggctgaatggttgggcggatcaggctgtagcggagacgtgcagtacctcgtaggcgatggcgttggttgggctctggtctgcatcgtggctactgagttcgacgaggatgacggtccaggtggtgatgtcgacggcggtgacgcgggcgatggtggaatcagtggatgctgcaaggaagtcggcggttatgtcttcgatgcagtgggacggagcagtgctggtgggcaggggcacggtcttgacggtcaggcttcgggcagcagagtaatcggcggttccgttaacaagctggtggacggtccagtcctggatcgggtgccggccgaagtcgcgtacgatagccgagtaaccaagttcgccccagcagaactggcgcatcccctctatgtcgcgccagacgtagaagggcgcgtaggagttctggggtgcgcctttgaccttttcttggatgaggtaggccttgaactccagtccatggtagccgtccatgaggtgtccagtctggatgacgcggtcgcggatgatctgcatgtcatagtcggtgggcagggtgatctgatattgcatggcgtacatcagcggttctccttggtttcgtgggagtaggtcgtggggatgacgggttcctgccaatcgatggttgacaagtcgtcggcggcttgttggtaggtaaggtggatcattggctgtttgagtgcagcgccatgccagtgtctctggccggcgtcgatccagatggattcgcccttggtcaggtgctggggtgcttgtccttcaatatggaccagggcaacgccgcccgtgacgtagaggccctgtcccttggggtgtgtgcctcagcggcaaacgtgacggcgtgggcggcacgcccggcgtcttccgtggcacgatcggccggatccatggcggcgcgcagctgctgttctgcagccaggcgtccaggtcacggcgggcagcatcgacacccagggcagcctcgacggcttcagggctacgacgctggccgggctggttgaccgcagaccactggtgccgggcgtcgtccagatcatggccggcggcgtcgatgagggcggtggtggcttcggcgcagcatcgcctgatccactccgaacgtgacaggccagctgtctcggcggcactgtcaatgcgcgccaggagagatttcatgggcgctcatctgtagcctccagataggcgttgatgtagcgcagagcctgatccgtcatgtcgatggcggctgcctcggcagacgacacaacgggctgtggatgataagaccacccaacatagacggcgaacatcaatttctcgacagctttcatgaggtccccggcggcaaccgcatccgcctcatcatccgaggagaaccacttcaggtctgaacggctgtacatagcccctaggtcctgatgtgggtcgaggtcc

SEQ ID NO: 237 - DNA, 5561 bp, Propionibacterium acnes
gggatgaggatgacggccgcgccgacacttcggagcgaggtcatgtgacgatccttcggtagctcgacgggttgccgtagatcttttccacgttgatgccgctgtgggggttgtcggcgctaaccatttggcctccaccgatgtagacggccacgtggtgggcagggtttccccagaggatgaggtcgccgactttgagctggtcacgggccaccgcggtgccgacgtgctgttgttcggcggcggtgcggggaaggctaatgccgatacgccggtacagcgccgaggtcaggcctgagcagtcgtagccgccatcggctttgccgttgccaccccacacgtaggcgtaggagttgttgtcggcgatcgatttggcccatgccacggcttcggccaggttcttcgacacaccggtctcgttagcggccccggtggcacagttgtttgacaggtgccctgtagtagtggatcccactatttgtttggccatggtttcccatttggcgtaggcatcgggcagggctgagccttgcactgcctgagctgcctgcgtcagcggcatcttctgccagtcagcgatgtcgactaaaccgggaatgtggaatccagggccgccggccgatccggggccagcgtaggtgatggtgtggcctttcaagaacgcctcggtggcgtaggcatcattgttgacctgatccagagtcccgtaccagcccggcaggatgcgctgctgaaaggggccggcgtcaccgtcaccgttagccttcgctgaggtagggtcggccccaagatctgattcttgtttggcggtcatgatagcgatgaccgctgcctgggtaggcagtttgtcacgctggaccacagtgacgatggtggtcacgagctgcttctgcctggccgtgaggcctccggcacccacagtgcctccggtgacggtacccacgcaagcatccccgccgacactgccaccgccgccgccagagttgtcgtcgagggccccagagcctactgacagcagcggcacaatgatcacggtcgcgggcaagaccgccaggcccgccagcatcagcactgctgcactcaccacggcgatcacgtgagatgctttcaacgctgcccacctctcgctggtttgagggggcgacgcctgctggtacgcacaggcttggttgatccagtccgccgttgattggcaggcctgggtttgatcggcttgctgggacccggtttgggctccggagtcttaggctccggcttcacatgcctaggcacttcggctgcggtgggaggagtcagcacgtggcgtactggcttggtgaccttctgggcacccgaaacaaccggcttagacaccaccttggcacctttgaccaccggtgcggctgccttcgcgccggccttcttgactgcacgatgcgctttgatagccccggcctcggcccggccaaccctactagcagtagcatcgaaggctctgtggcccgtcgttgccctcaccggtgcatccttgccctggcgggtctgcttagcgatcgccgacatgccgcctcgcaatgccgaaacacggttgtgggcgtgggcgatcgccgacataccggccgtcgtaattttcgactggccctgcggggcccctgccccagcacgaatctgccggtaagccgccgacgtgcgacgagcacccgccgccattcgcgccaccttcgcagccctagtcactcccgtcgacacgccacccgtggctaccgcagcagcacccgagaccacagtcgaggccatccgccttcgacccgatccagtgagcttgcgaccaccactgcgcaccatccggcgagcaccccgcccagcccactggccaatcgccgacgccccttcagagcgcttgctgcgcatccaatcgttgatcttgtccctcagccccttctcgcccttgtgacgacgccacatggacatcaagaacccgataatccccacgagctcgagcatgttgacaaccatgaccttgatggcgacatcaccgtcagaggcgaaaaccgacttgatgatgagcatgaccacacccaacatcaccatcgacccgacaatgccgatcatcgagtacaagatcgaacacagatcccggatgagcggatctgtgcggccagggatagcccgcaacacgttgagcatcgacatgaacgccgaccacaccaacttgcacacgtagaaccagcacatgcccgcgaacaccagcaggaccacagccaaacccgccaccgtcgacgagtaaaagaagaaccccaccaaccacgaaccatccgcaatatcgccggcgtaatccgacaacccctcatcacagtcaccaaggtcgtcgcgagcatccgagacgtcatcgtaagggccacccttgagcacctcgatgtacttgtcgtggcacttcgcatcaataatccggccatagttgagctgctgatgaaccggcgccacgaacgagtccacaatgatcgccgacagcttcggatccttcgagtctcccgtcgaggtcatgtcatcaggaatctcgacctcaccagcggtcgccgtcgcaggatcaaccgaactggtaatcatccgagacagcgccacgccgaactgctgggtgcgagccagcggagtagccaacgtcgtcgtatcgcctgcgaacttcgccactggggccgccaagaaacccaacgccagcgccgcagcaatcgccgcacgcgcacccgtagcccacgcccctgccgtacgtcccctcatcatcttgacgaccacgcccacaccggcgcacgtcgtcagcaacgtcaacaccgttccaccccagctgtccgctcccagcggggccaaaaccttgtcgtggatgtcgttctgtaaccccaccagcggtccggtaatccacccgacccagctcatcgccacggtccagtccaacaaccggcacagcaacgcaatgaccatcaggtacgtgttccaacacatgccaataatggaggcccacatactcttcagcggggccgtaacgccaccatcgtccatcgacatctggtactgaaacaagtgaataccgttggagtcagtcacattgaaaccgtcacccatccagcccagccccgggcccgatgccatggcaggcacactgctcagcgccaccaccaaaaccagcgtggtgacgatgatacgaaatcgccgctccccggccccggggcggcgtggatgacggctcacgctgtctcctggtcgtgctcgggcgggttggagctggcggcttcgcggtggggagcgtaggcaggtctcagtagtcgaatttcaccgacgttgccgtgttggtcggcgtacaggccacaaccggggcctccggggttgagggcaatcttgaccaggtcagcgaactcttcaggggacgtcttgggatctacgcccaggaactcgacacctttctgggcgaggttgatgttgtcgcacagcaacacgatgcgatgctgaatgaggttgcggacggtctcgttggggtaatcggcctcggggtcgtgggagccagtaatgagccaggcgttggctcggcgggattcgcgcacgtactcatcgatggcgtgggaggcttccggcgaggacgacatgtgatgaaactcgtcaacaatgaaagcggcgtcgcgggcccggtcgctgaagcacaccaggcgagccagacgggcaataagcgcgtagagggctcgaccaaacaccttgtgcgggggcagctgccgaaacaaatgttctgacagcatctcctcggcgttaggaagagcgatgccacaagtgccaatgatgaggatgtcggcactcaggtcggcgggaggaaggtccgggtcaaagatggccgaagctagggaggccgagttctcgatgtcagcgaacacggcaatcctgtcagcgatcgcggtggcctcgggaaggtcgcactcctcggccaggtggcgggccaaacgcccacacgaggtgatctggtggtcacgcatgtaggccggtttgaggaccttggccagcgtggtcccggccacaccgatggtctccaagttaagcaaggtcagcaagaacgactgggcgacctgcccggccatctccgggggaaggatgcgcagcgggtccagcgacagcttggggtgggccgtgtcgacgatctggcgtctaaccccgtcgatagagttgacaaaggttacccactcccgctcatcggagttgtcggtggcaataatgcgcccgccccgggccgcgatggctgcgcacagccgcttctcggccatcgtcttgcccgcgcccatcttgccgatgaacgccaccgtgttgcctttctgatcctgagtgtcggcatgcaaatcgaggtaggccagcgactgcaacggggagcctgtgaccacagccaacgggatgccggtggtacggcccaaccggtactcaaccaccgggatagatgcggcgaacgcggaggcgtgagtcagctgacggtaggcgttaagtgaggaggagaaccggccaccgggccgggcagcccacagcaagtcctcctgacggcccacgggacgcacccacgtgaagtcaccgaacaccggatcattgacgaacgctcctgccagctcctcggtggtctcaaagtcaggagacgagacagtgacggtgataagagcctggatctcgacctcacgctcatcggcggccagctcggcgttgtagtcgacgagcacctgagcggaatgctcgatagacatgagggtcgaagcctgggtcatctcaccgccctcaacattgtcgagctgatcgaccgtttgacggatagcccgctgatttttctgcatcgcagcgtgacgggtccgggccactccccggatcgccacgtcgaccggcacgccagtgtcgtcgatacggcccaggaactcgtaggcaggccacgtcatcgtgcggggcaccttacccagcacgatatgggactggtagacggtctcgccggtgtcggcaccgattttgaggacgcgacgattccacgcctgagccgtccgggacatgtgggagactcgcttgtcatcctcgctggccagcaggtcggaggtcgcggcctcatcgatgaccaactcccccagcgcggcacgtccaacctcatccatgagggcgattccctcgccaggggcatcatcacgcaaccgggtcgggtggcctgacaggtgctgccgaagccagatctgttcatcaacggtgaccgggcggggttggaacgctgccggcagtttcgcaccgaattccttagcctgacggagggcccactcccgtgcgacacggccaggagcggtggtcatgagtccggcggcttcggtgattttgttgagggcggcggtccaggcggtgtgggtgcgtattttctggtcttggttgagtttgatcgataggaaccacacgcgccggcctagggattcggtttcaggctggtcgagggtggcgtcgatttcgtcggcccacacggggtgttcgctcaggtcgaggccggcggccatggcgtcgacgatttctgtggggtcggtccaggtgagggctccgttgag

SEQ ID NO: 238 - DNA, 4899 bp, Propionibacterium acnes
gataccgcaaggctgtgtgggatcagctgttcgggatggggcggttgcagccgctgttcgaaatcagcgacgccgaaaacatcatcgtggtgggtaaccatgaggtggttgtcgaccacaacgatggttcccggtcaacgctgccgccggtggccgactcggatgccgagctggaatcccagatcgcccggatggcgaggaatgcgaccccgcggcgagccttcgacgccgatcacaccgatgtgacgatcatgcaccaacagaagttccgtatccacgcgatctcttcggaggtgtcgttgcaaccgtcggtggtcatccgccaacatttgctcacccaaatcagtctgggggacctgtcccagcggggaatgatgccggtggaagtggcccggttcctcgatgaggcggtacaagctggcaagtccatcgtggtcgccggcgagcagggggcaggcaagacgacgtttttacgagcgttgatccacgccattccgatgcgggagcggttcgccacgttggagaccgatcaggagttgttcgctcatctgatgcctggccgggaaaacacgctggtgctgttcgcccgtgatggtaacggcgaggtggatccggcgactggcacccagcacggcgctatcgagatcgcccagctgattcctcctagcctgcgccaggcgttaactagggtcattgtcggtgaggtgcgcggcaatgaggcttcggccatgttccaggctatgcagtcggggactggcactatgagcagtatccactccccgcgagcctctgaggtgccgtcccggctagcccaaatgatttcgatgggcccggtctacgatctggatcaggccatgctgcagatcggtcattcgatcgactacatcgtctttgttcgtaagcgtgacctgcctgatgggagccggctgcgatttgttgagcagatccgttcagtctcgcctggtgattcgacaactcccagtcttggcgaggtgtacacggctgactcgtggacaggccagccgcttacgccactcatgcctggttcggccgccgacgagctgtctcacttcgcccgagacctggattactgcgaggcccactgatgaacaccccagcgctgatagcagccctcatcgtgaccggcctgggactgatcatggccatcaacggcctgatcccggccacacccaaacccggcaccacgctgacgctgtcacagcggtgggcccgggccacccaccgcccagccggggcagccgggcgccgacgcgacctgcgctgggcgctggccggtctcgtcggcatcgtgctgttcgtcctcacaggttgggtcgctgccctggccctgggccccatcaccgtgctgctagcacccaccctgctgggggcggccccaccgaccgatattccgctgatggaggcgttggatcggtgggtgcgtcaggtcgctgcggtgctgccacaggggcgagacatcatcacagcggtgcggatctcacggccgcgggccccgaagctgatcgccgggtcggtggatcaactggtgtcccggttggatggccgtatggagccgagggaggcgttccagcggatggccgacgagctggactcggctgaggctgacgcggtgctggcctcactagcgttggcggccactcatccgcggggagcctcgacaacgttgaaggctattgctggcaacatccaacagcggttgaaagtgctgcggcaggtggaggctgagcggtctaagccgcgtaactcggtgcgccagatcacactggtcacgatcgccatgttcggggggctgctcgtgatcggacggtcgtttctggccccgctggcgacccctcccggtcaggtgctggtggccgtggcggtggtcatgtatgtcatcgcactagtgcagatgtatcggatggcgcggccccgtcgacgcacccggatcatggtcaggaggacccgatgaccattactgctttgtccctgctggccggggccatcgtcactgtcggactgctggtcatcgtggcagcgttccgcccagccccaggccctgacctggttgccgctctggaggtggtgtcgggtcgcacctcaagcgtcgccgagaacgtcgaccagacccggatcgggcggataggtcgcagcgtgacccgcacattccatgtgtcggtgtccccggccatgcgggccgcactgcgactccaaggcacgacccccgaagcgttctacggtcgacgcctgatctgcgcactgatcggggcgatcctgccgtggctgctcaacgcggtagccatcgcggtaggggcgaattccccgaacctactcatcccttcggcgctgtgtgtggcgttagctggcgctggatggatgctgccggcagcacggttgaaggctgcggccgggcccaccaacgatgactcgttcgaagcgctgctggtattcatcgatttggtcgtgctggaacggctcgccaacgaaacctccgtcgacgcgctcaccaatgcggcaaacatgtcggactcgccgctattcgtccagatccgtcaagtcctcaaccgtgcctccctggaaaacgtcgacccgtggaacgggctagaccggctagccgaggacatcaaactgcccgaactcaccgatgtggtctccatcgcccgcctccaaaacgaaggcgcctccctcgtcgacagtttccgggcccgagtcgccgagttgcgcgacgcctacctgctgcgcctgcaacaagaatccaccgccatcacccagcggcttggtttgtggacgatcctgcaagccggctcggtcatgctcatcttgctgggggcggccgccctcacactcatcacagccggataaaccgacatcgtgtcgagcccccatatgggccgcgaacctttcataatgatgcctgtaagcaccacaatattgatcacaacctaacaatgaaggagaaatcatgatgaccgatctcgacctggctaaaaaacagatcacctggctggcggcgcacctgcgttcccggatcgttgacgagcgtggcggtggtagctctaccgtggagacactgatttggattggtgtcatcgtggcgctggtgattggtgtgggcgtcggggtgacggcctatatcaggtcgaagatgcctcactgacgacgatgcgtagcaggttcacaactgatcagcgtggcggtggtagcgcgtcggtggggatgctcctgctgatgcctgcgatcatgctgctggcattcggtgggatcgaggtcgggatgtggtgtcacgcccatcagtcgaccatcgcggcagcccaaagcgccgcggaggctcagcgtgtcgtccatccggtcccggggtcggcacaggaggcagcctcgcagatcactagtcatggcggggtgcgtgatacccggatatcggtcagtgatgacggggccactgtcacggtgaccgtctcaggtcgggccccatcgatgctggggctgcatcttccggctgtgtcgtcgacagcgtcgatgcccaaggagcgcctgtcgtgaggcgaagtgagcgcggtggagcaagtctaagcgtcgaggtgctcatgtgggcgccgatcgcgctggtgatcatcgggtttgttgtgggtatcggccggatgtcgatggcccaggacgcggtgaatggcgcggcgggtgctgcggcccgtgcggcgtcgttggagcgtgatggacagtcggctcagtctgcggcgcagcaggcggcgtcggcgaacctgtcgtccggtgggctggcatgtgcgccgaatgtgagcgtggacacgtcagtgtttgcccgtcctgccgggcaggcgggcacggttcacgccacggtcacgtgtgtcacctcgctgggtcttgggttcgggtcccggacggtgcacgcaacggggtctgccccggtagacacctatcgggaaaggagaggctgagatggcccgtgatgagcgtggtggcggctcggtgtcggtgtggatgctgctcatggtgccggtgattctggtcatggccggcctggtttttgacgggtcccgtcagatatcggcaacccaggcggcccaggacgcggcggttgcggcatcccgcgccggaactgatgcggcagcgacaccgcagcttgctggccacgacggggcggccgtagcagtccaagcggcccgccaggcactatctgctgccggggtggacgggtcggtgcaggaggacgggtcgaccatcacggtgaccacgtctcaaagtcggccgacagtgttcctgtcagcgatcggaatcagccaggtaagggggcatgggcaggcccatgctcagcttgtgggaccgggagaacgcccatgacagtgatacgtcgtatcggtgccctggtggcactgctggtggtgatagccggcttaccggccgggctcgtggccgcaggcgccccgctagtaccggcgggcctgtcatgggcccatgtgcggcatctgttggttaccccagacatgaccgggtcggtgctggtgtggctggtcagcctcatcggctggatcgggtgggcatggttcgccctggccgtcgcagccgaagcggtgacgatgctctcagggcagcggctgcactggcacatgcccggccctcgcctagtgcgccgagtggcagccggtcttctcattgccgcgttcgcggccgcaccggcagccacaagcacggctcacgccgccgaggccacccatgtggcggtcgccgcccaggctggaccggcacacgcggcccccgcccaggacagccccgccaccacctctcaggccccggacgcctccaccactccgaaaatctggaagacctacacggtgcgggccaacgactacctgtggaagatcgccgagcactactacggtgacggcg

SEQ ID NO: 239 - DNA, 5203 bp, Propionibacterium acnes
gcgataccgcaaggctgtgtgggatcagctgttcgggatggggcggttgcagccgctgttcgaaatcagcgacgccgaaaacatcatcgtggtgggtaaccatgaggtggttgtcgaccacaacgatggttcccggtcaacgctgccgccggtggccgactcggatgccgagctggaatcccagatcgcccggatggcgaggaatgcgaccccgcggcgagccttcgacgccgatcacaccgatgtgacgatcatgcaccaacagaagttccgtatccacgcgatctcttcggaggtgtcgttgcaaccgtcggtggtcatccgccaacatttgctcacccaaatcagtctgggggatctgtcccagcgcggaatgatgccggtggaggtggcccggttcctcgatgaggcggtgcaagctggcaagtccattgtggtcgccggtgagcagggtgcaggcaagacgacgtttttacgagcgttgatccacgccattccgatgcgggagcggttcgccacgttggagaccgaccaggagttgttcgctcatctgatgcctggccgacaagacacgctggtgctgttcgcccgtgatggtaacggcgaggtggatccggcgactggcacccagcacggcgctatcgagatcgcccagctgattcctcctagcctgcgccaggcgttaactagggtcattgtcggtgaggtgcgcggcaatgaggcctcggccatgttccaggccatgcagtcgggtacaggcaccatgagcagtatccactccccgcgagcctctgaggtgccgtcccggctagcccaaatgatttcgatgggcccggtctacgatctggatcaggccatgctgcagatcggtcattcgatcgactacatcgtctttgttcgtaagcgtgacctgcctgatgggagccggctgcgatttgttgagcagatccgttcagtctcgcctggtgattcgacaactcccagtcttggcgaggtgtacacggctgactcgtggacaggccagccgttgaccccgctcatgcctggttcggccgccgacgagctgtctcacttcgcccgagacctggattactgcgaggcccactcatgaacactcccgcactaaccagcgccctcatcatggccgggctagggctgatcctggccatcgacgggctggtcccggcgccgcctcgacctggggccccgctgagcccggcccaaaggtgggccaggctcacccaccgtcccacaggagcggccgggcgccgccgggatttgcgttgggggttggctgttctcgtcggcgtcgtgctgtttgtgctcaccgggtgggtggctgcgctggcgttgggccccatcattgtgttgttggcccccaccctgctgggggcggccccaccgaccgatattccgctgatggaggcgttggatcggtgggtgcgtcaggtcgctgcggtgctgccacaggggcgagacatcatcacagcggtgcggatctcacggccgcgggccccgaagctgatcgccgggtcggtggatcaactggtgtcccggttggatggccgtatggagccgagggaggcgttccagcggatggccgacgagctggactcggctgaggctgacgcggtgctggcctcactagcgttggcggccactcacccgcggggagcctcgacaacgttgaaagctattgctggcaacatccaacagcggttgaaagtgctgcggcaggtggaggctgagcggtctaagccgcgtaactcggtgcgccagatcacactggtcacgatcgccatgttcggggggctgctcgtgatcggacggtcgtttctggccccgctggcgacccctcccggtcaggtgctggtgaccgtggcggtggtcatgtatgtcatcgcactagtgcagatgtatcggatggcgcggccccgtcgacgcacccggatcatggttaggaggagtcgatgacgacgactgctttgtccctgctggccggggccatcgtcactgtcggactgctggtcatcgtggcagcgttccgcccagccccaggccctgacctggttgccgctctggaggtggtgtcgggtcgcacctcaagcgtcgccgagaacgtcgaccagacccggatcgggcggataggtcgcagcgtgacccgcacattccatgtgtcggtgtccccggccatgcgggccgcactgcgactccaaggcacgacccccgaagcgttctacggtcgacgcctgatctgcgcactgatcggggcgatcctgccgtggctgctcaacgcggtagccatcgcggtaggggcgaattccccgaacctactcatcccttcggcgctgtgtgtggcgttagctggcgctggatggatgctgccggcagcacggttgaaggctgcggccgggcccaccaacgatgactcgttcgaagcgctgctggtattcatcgatttggtcgtgctggaacggctcgccaacgaaacctccgtcgacgcgctcaccaatgcggcaaacatgtcggactcgccgctattcgtccagatccgtcaagtcctcaaccgtgcctccctggaaaacgtcgacccgtggaacgggctagaccggctagccgaggacatcaaactgcccgaactcaccgatgtggtctccatcgcccgcctccaaaacgaaggcgcctccctcgtcgacagtttccgggcccgagtcgccgagttgcgcgacgcctacctgctgcgcctgcaacaagaatccaccgccatcacccagcggcttggtttgtggacgatcctgcaagccggctcggtcatgctcatcttgctgggggcggccgccctcacactcatcacagccggataaaccgacatcgtgtcgagcccccatatgggccgcgaacctttcataaggatgcctgtaagcaccacaatattgatcacaacctaacaatgaaggagaaatcatgatgaccgatctcgacctggctaaaaaacagatcacctggctggcggcgtacctgcgttcccggatcgttgacgagcgtggcggtggtagctctaccgtggagacactgatttggattggtgtcatcgtggcgctggtgattggtgtgggcgtcggggtgacggcctatatcaggtcgaagatgcctcactgacgacgatgcgtagcaggttcacaactgatcagcgtggcggtggtagcgcgtcggtggggatgctcctgctgatgcctgcgatcatgctgctggcattcggtgggatcgaggtcgggatgtggtgtcacgcccatcagtcgaccatcgcggcagcccaaagcgccgcggaggctcagcgtgtcgtccatccggtcccggggtcggcacaggaggcagcctcgcagatcactagtcatggcggggtgcgtgatgcgcggatatcggtcagtgatgacggggccactgtcacggtgaccgtctcaggtcgggccccatcgatgctggggctgcatcttccggctgtgtcgtcgacagcgtcgatgcccaaggagcgcctgtcgtgaggcgaagtgagcgcggcggagcaagtctaagcgtcgaggtgctcatgtgggcgccgatcgcgctggtgatcatcgggtttgttgtgggtatcggccggatgtcgatggcccaggacgcggtgagtggcgcggctggtgctgcggcccgtgcggcgtcgttggagcgtgatgggcagtcggctcagtctgcggcgcagcaggcggcgtcggcgaacctgtcgtccggtgggctggcatgtgcgccgagtgtgagcgtggacacgtcagtgtttgcccgtcctgccgggcaggcgggcacggttcacgccacggtcacgtgtgtcacctcgctgggtcttggattcgggtcccggacggtgcacgcaacggggtctgccccggtagacacctatcgggaaaggagaggctgagatggcccgcgatgagcgtggtggcggctcggtgtcggtgtggatgctgctcatggtgccagtgattctggtcatggccggcctggtttttgacgggtcccgtcagatatcggcaacccaggcggcccaggacgcggcggttgcggcatcccgcgccggaactgatgcggcagcgacaccgcagctagctggccacgacggggcggccgtagcagtccaagcggcccgccaggcactatctgctgccggggtggacgggtcggtgcaggaggacgggtcgaccatcacggtgaccacgtctcaaagtcggccgacagtgttcctgtcagcgatcggaatcagccaggtaagggggcatgggcaggcccatgctcagcttgtgggaccgggagaacgcccatgacagtgatacgtcgtatcggtgccctggtggcactgctggtggtgatagccggcttaccggccgggctcgtggccgcaggcgccccgctagtaccggcgggcctgtcatgggcccatgtgcggcatctgttggttaccccagacatgaccgggtcggtgctggtgtggctggtcagcctcatcggctggatcgggtgggcatggttcgccctggccgtcgcagccgaagcggtgacgatgctctcacggcagcggctgcactggcacatgcccggccctcgcctagtgcgccgagtggcagccggtcttctcattgccgcgttcgcggccgcaccggcagccacaagcacggctcacgccgccgaggccacccatgtggcggtcgccgcccaggctggaccggcacacgcggcccccgcccaggacagccccgccaccacctctcaggccccggacgcctccaccactccgaaaatctggaagacctacacggtgcgggccaacgactacctgtggaagatcgccgagcactactacggtgacggcgcccaattccgtcgtatcgccgaagcctccggtatcgacccgcactcagagctgaaagtcggccagaaactggtgctaccggttcccgagaacacggccgcgatccattcggttaaagcgggggagtatctgtgggagatcgccgagcactactacggtgacggcgcccagtaccataaaatcgcggaagcttccggtatcgatgcccattccgatctagccgtgggccaaaaactcgtcatccccgggcccctccgccacgacgccacgccgccacaccactcggcgtcgacccacgcgaag

SEQ ID NO: 240 - DNA, 2238 bp, Propionibacterium acnes
gacgccggccaccccaactactccgacccacacggtgaccccagctccggcctctgccggccactcgaccagcgacgagcacccactccatacggataccgccacagcggacaaggccagcgacgaggacgccctgtccccaatccaggtgggcttgaccgccagcgtcggactggtgctggtcgccggactgatcaccaccctcaaccgccgctaccggacccggttcacccgccagccccgcggcaaggccatgaccctgcccagcccggacgcccaaactgccgagatagcgctgcgcagcaccggggcgactgacactctgacgatcacctgcctcgaccaggcgctccgcgcgatcggcgcatggtgccaccactgcgggcacccgctgccacccctgctggccgcccgcgtcgacgacgaccggatcgacctgctgctatcccaggcggcccccgaccatcccgaggcggtggagctggccgccgacggatcggtgtggaccctcaccgccgaccggatcgacgacctgctagcccacaccgatgacaaccaagcggctccgtggccagctctagtcacactgggacgcgacgacgacggcgcccacatcctcatcgacttggaagccgcaggaaccttgcacctgatcgccgacgacgaccaggtcgacgcagccctcgccgccatcgccgtggaactggccacctgcgactggtccgacgaagtcaacgtcaccctcgtcggccaagtgtgcccgggcctagaagaggccttgggctctccaaccctgacccgcgccaccgacgtcgacgctctcttggagacgttggaggctcgcgccgacgatcagcgacacatcctcaccgaaggaaaccccctcgccgctcaccgagccgaccccgccatctccgacgggttcgacgccgaagtgatcctcctcgacaccgaactcaccgaagaccaccgcaaccgcctcgccagcctcgtcgaggctcttccccgcgtgtcagtcgccgcggtaacaaccagccccaccagcccacacgaatggtccctcaccctgacaggtgacccactagccgccgacctggctcccctcggctggcacatccacccccaaaccctctcccccgacctgtacaaccgcatggttgaactactcgccaactccgccgccgcagactacgaacccgccagctggtggaaccacgacgccgacgacgagcccaccaccgaccccaccaacgaggaagaatctaccccgagcaggcgagcccgcccgaatatccgcctgaccaccctgaccggcggcatcgacctatccagcgtcgacatcgacgacatcatcgacgaagccaaccaggccctcgacaacaccgaccagaccaccaaccaggttcgcgtcgacaccgaccaacccggcaccgacacccccttccccatcgacgacatcgacccgctgagctccgaccacccggtcctatccatcatcggccaccccgacatcacaggtgccactggaaccgttgggcgctccccgtggcgctgccaacagttggccctctacatcgctgagcatccgggagcatcgggggcgactatcgccgatgatttggggctatcagcgccgacggtgcgctcgattgctacacacctgcgacactggttgggagccgacgatgccggggtggcttacatgccggcggcgacgcgcggctaccggctcgatgagcggatcgtcacagatgtggacctgatcgacgctgctgtggccggggcaggcattaacaccgctgagacggccacactggtggccattttgaagctgggccgcggacgggtcttcgctggggttcctgactcggaacttcgccagttcagggcgtcgatgtaccacgtggaggcccgcatcgtcgatgctgccctccaagtgacagaccgggccctggaagccggagacttggggctggcccggtgggcgctgacccaagggctactggtgtctcccgatcatgaggacctggtcgccggttgtctgcgcaccgaataccaggccggcaacatggacaaggtcgccgagctggtcgatcacctgtcggctaccgcacgccgactgggcgtcgacctcaacgaggacaccacccggatcatcgatacggtcacccacgccgacaggagagcatcatgatctcccctgcactcatctccgtcaggaaggttcctatgcaccat

SEQ ID NO: 241 - DNA, 739 bp, Propionibacterium acnes
acgtgcgggtacacctaccagcaggcagccccggaaggcggttatcaggtcaccgcaatcacgtcgtgggatgtgacctggtcggtactaggacacacgggcacagtccatatcgagaaggccggtgggcagatgcttccggtcggcgagttggagtctgttgttacacggcgatgactcctgatagtccgacgctgtatgaggtgttgggggtctgccctgatgccactgatgaccagatcaagacggcgtggcgtcgtgccgcgaaagtgactcaccctgatgccggtggcactagtgaggcgttcgcggccgcccggcacgcctgggaggtgttgtctgatcctgcccggcgcaccgcctacgatgccgacctggcgggggaggatgatcccgacgacgaagccgccgacgccttcgacgttgatccgttcacggcatggccctggtgcgccccgtacatcgacgccacccccaccctgcgccacacctgccccggcacgatcaaggccatcgtggtcgccatcgccgggatcatggccggaatcggctggcaggaagcgctggaggccgtggtgtcgccgccggggtttctgggggcgtgctggatagtctcagtgccggttgtcgtcgcagtgacatggctggcagcggtgacgggtctggcatttttcaccatggcggccatctggtgtggatggtcgttgataggtggtgcgttgctgtggggccagacgtc

SEQ ID NO: 242 - DNA, 4920 bp, Propionibacterium acnes
ggccatcctgcggccgcaatagccgcgacggcgaccacccacacgatctgttgcatgggtctcatcatggcccatcatcgatgagtatgggtggccgacatggggtcactcgtagaggggatcgaggggtgtgcgggcgagcatggcttcctgtgtgccgagcatgagggtgccagagtcgtcgccggccgattcccagtcgacgatgatctgcccgctgtcgacgctggattcggtgatggtcacccattctccgtcgatattgatgagcaccccagcggccagctctgtggcagcaaccgggtgggctgggctgtagaggaggtcgatgtcgcgggcagggtcgtcgggttcttcggttacctcgggtggggtcgatctggctgtctcggtgtcgtcggccaggtcggctcccaggatgcgttcccattcggggctggttttcttgcccgctgaggccatcgtctcgtcgatctgttcgtcagtgggccacacaaatttctttttggtccaggtcgtggtgtcgggtcgcagctgatccagcagttccaggtcttgcggggagtgggccttgcgggggtcgggggtgtagaagaattggacttccttgggggctgattcgccggataggtaggtgccgcggccgcgtttgccgaacgggattcccacgccgacgtgttcggagccgaacatcatgcgggctccgtcagcggacaggggtccggtggcggcacgcccggagaagttgtctcggatttcgccgcccaggaactcggcgtcggggcgttgggtccccagatcgacgtggatacggcaggcggctgccatgcgcagcagggagccgatccagccgaaaacggggcattctccgggcatcccagagaccttgatcgttgaccaccagtttttcgcgttgccgtagaactggcggtactcgtcgatgaggaccagcacgcgggtgaagtcggtctcgcgggccccttcttcttcgatgcggcggtagcggtcctccatgagagaccacagccagtggatgagggcgacctggtcggggacggtagtggcgaccatctcgatgttgggccactcccgcaggcccaggtactcgatgcgtttagggtcgatgacgaagacgcgccagttgcggcgggcaccctcgacggcgtcgccgatcatggacaccgtttttccggtacgggtgcggccggccttgagctggtgggccatgacaccggagatgtcccagaaacaggtgttgccgtcctcgtcgacggcctgggggattttctcccagtctggggagtctgggcccggaagggccacgggtcggggcaccatcgagggcagggggtggcggcgggtgacggtgatggtgtcgtgttccaggtcgaagtcgctgcgccactggccgagcatcatcgccgaggtcaccgcggccaggcgcaattggatgttcgggctggacaaatgggcgccacgttggtggtgaatggtgaagccgtccaggttcccccgatcggttttccaggaatcgacggtgaccgccgacccatagatctgagtggctacttctttagcccgttccttgtctcggtccagatcggttttgtcagggtcaggggtcggggcgcggtattgcaggacgaaccggccggccgggatcgttgcggatgtcaccgtgaactctgccggcgaccaggcagccgcggccgcctgggtgagggccattggcatggtctcgacggcagcctcctcgggggggatggtgagggtcaggcgtcgcggatgcgtcttcttgcgattccatgtgactttctgcctcaccggcaccttcgccgccgactgaatggctaggcgagctgattcggcagtttcggtacgccggccagcgcgtagcgcccgtcgtgcgtgaaggctgcccaccacagcacagcccatacacggcagccaccagcgcggatcagcggctgctgcatagcccccggtagctagtaccgcacctgaccagccggccgcgatacttttccacgccggtttcgcaccaacagtcggggcagacgctggccgcttcgagaccgaggagggacgagacaagggagtgctggtcatgccgcggcctccttgtggcaggtcatttcacaggcatgccggccagcgatgatgccgtggcgcaccgccccggtagccgcatagaccgcgcacaactcaaacacggggcacccatcgcaggccgccgggttcatgctttctttgtcccacgatggtgggtcatcggtgcacggcacggccaggccatcctgttgagcggcgctgatagcggtgaataggcgcagctgggcgcgaacttggtctggggtcaggttgacggtgcgggctacacgcatggggttccttcctcttcaccagtgaaggttccctagacccggccgatgtgcggagggatttcagtgttttatcgaggtgaccagccagccggtctgcgctgcgggttcaggtaccagggtcagatgcaccacggtgtggtcggctaggggcacggcgaccaggggcccgtcggcgctcgccccggtgagggtgggagttccggccacggtggtggcgggaatctggttgggtttcgcggccatcagggagcccatgagggtcggggcggcgatctggacgagggcgactttgcgggcggcgggatcgcgggtcaaccagccgcgggtgaaggtgagcgcagccgacgtgatatcggggctcagcggggctggtgtggcggcggggtgggccgttgaggagggccatacgcgcggtagcgctggcgacatcgagcgggtcggagtggggtcaggtgtggggcttagggtccgatgtggcgatggggctaccgccccggtggtgggagacgagactggttgggggtggtgttgagggcgtgggatcagggtgaaggcagccaaactggccgggatgaggatgacggccgcgccgacacttcggagcgaggtcatgtgacgatccttcggtagctcgacgggttgccgtagatcttttccacgttgatgccactatgtgggttgtcggcgctaaccatttggcctccaccgatgtagacggccacgtggtgggcagggcttccccagaggatgaggtcgccgactttgagctggtcacgggccacagcagtgccgactttctgctggtcggcggcggtgcggggaaggctaatgccgatacgccggtacagcgccgaggtcaggcctgagcagtcgtagccgccatcggctttgccgttaccaccccacacgtaggcgtaggagttgttgtcggcgatcgatttggcccatgccacggcttcggccaggttcttcgacacaccggtctcgttagcggccccggtggcacagttgtttgacaggtgccctgtagtagtggatcccactatttgtttggccatggtttcccatttggcgtaggcatcgggcagggctgagccttgcactgcctgagctgcctgcgtcagcggcatcttctgccagtcagcgatgtcgactaaaccgggaatgtggaatccagggccgccggccgatccggggccagcgtaggtgatggtgtggcctttcaagaacgcctcggtggcgtaggcatcattgttgacctgatccagagtcccgtaccagcccggcaggatgcgctgctgaaaggggccggcgtcaccgtcaccgttagccttcgctgaggtagggtcggccccaagatctgattcttgtttggcggtcatgatagcgatgaccgctgcctgggtaggcagtttgtcacgctggaccacagtgacgatggtggtcacgagctgcttctgcctggccgtgaggcctccggcacccacagtgcctccggtgacggtacccacgcaagcatccccgccgacactgccaccgccgccgccagagttgtcgtcgagggccccagagcctactgacagcagcggcacaatgatcacggtcgctggcaagaccgccaggcccgccagcatcagcactgctgcactcaccacggcgatcacgtgagatgctttcaacgctgcccacctctcgctggtttgagggggcgacgcctgctggtacgcacaggcttggttgatccagtccgccgttgattggcaggcctgggtttgatcggcttgctgggacccggtttgggctccggagtcttaggctccggcttcacatgcctaggcacttcggctgcggtgggaggagtcagcacgtggcgtaccggcttggtgaccttctgggcacccgaaacaaccggcttagacaccaccttggcacctttgaccaccggtgcggctgccttcgcgccggccttcttgactgcacgatgcgctttgatagccccggcctcggcccggccaaccctactagcagtagcatcgagggctctgtggcccgtcgttgccctcaccggtgcatccttgccctggcgggtctgcttcgcgatcgccgacatgccgcctcgcaatgccgaaacatgattgtgggcgtgggcgatcgccgacatgccggccgtcgcgatttttgactggccctgcggggcccctgccccagcacgaatctgccggtaagccgccgacgtgccacgagcacccgccgccattcgcgccaccttcgcagccctagtcactcccgtcgacacgccacccgtggctaccgcagcagcacccgagaccacagtcgaggccatccgccttcgacccgatccggtgagcttgcgaccaccactgcgcaccatccggcgagcaccccgcccagcccactggccgatcaccgagcccctttcggaacgcttgctgcgcatccaatcgttgatcttgtccctcagccccttctcgcccttgtgacgacgccacatggacatcaagaacccgataatccc

SEQ ID NO: 243 - DNA, 4903 bp, Propionibacterium acnes
gcgataccgcaaggctgtgtgggatcagctgttcgggatggggcggttgcagccgctgttcgaaatcagcgacgccgaaaacatcatcgtggtgggtaaccatgaggtggttgtcgaccacaacgatggttcccggtcaacgctgccgccggtggccgactcggatgccgagctggaatcccagatcgcccggatggcgaggaatgcgaccccgcggcgagccttcgacgccgatcacaccgatgtgacgatcatgcaccaacagaagttccgtatccacgcgatctcttcggaggtgtcgttgcaaccgtcggtggtcatccgccaacatttgctcacccaaatcagtctgggggacctgtcccagcggggaatgatgccggtggaagtggcccggttcctcgatgaggcggtacaagctggcaagtccatcgtggtcgccggcgagcagggggcaggcaagacgacgtttttacgagcgttgatccacgccattccgatgcgggagcggttcgccacgttggagaccgatcaggagttgttcgctcatctgatgcctggccgggaaaacacgctggtgctgttcgcccgtgatggtaacggcgaggtggatccggcgactggcacccagcacggcgctatcgagatcgcccagctgattcctcctagcctgcgccaggcgttaactagggtcattgtcggtgaggtgcgcggcaatgaggcttcggccatgttccaggctatgcagtcggggactggcactatgagcagtatccactccccgcgagcctctgaggtgccgtcccggctagcccaaatgatttcgatgggcccggtctacgatctggatcaggccatgctgcagatcggtcattcgatcgactacatcgtctttgttcgtaagcgtgacctgcctgatgggagccggctgcgatttgttgagcagatccgttcagtctcgcctggtgattcgacaactcccagtcttggcgaggtgtacacggctgactcgtggacaggccagccgcttacgccactcatgcctggttcggccgccgacgagctgtctcacttcgcccgagacctggattactgcgaggcccactcatgaacactcccgcactaaccagcgccctcatcgtgaccgggctagggctgatcctggccatcgacgggctggtcccggcgccgcctcgacctggtgccccgctgagcccggcccaaaggtgggctcggctcacccaccgtcccactggtgcggccgggcgccgccgggacctgcgttgggggttggctgttcttgtcggtgtcgtgctgtttgtgctcaccgggtgggtggctgcgctggcgctgggccccatcattgtgttgttggcccccaccctgctgggggcggccccaccgaccgatattccgctgatggaggcgttggatcggtgggtgcgtcaggtcgctgcggtgctgccacaggggcgagacatcatcacagcggtgcggatctcacggccgcgggccccgaagctgatcgccgggtcggtggatcaactggtgtcccggttggatggccgtatggagccgagggaggcgttccagcggatggccgacgagctggactcggctgaggctgacgcggtgctggcctcactagcgttggcggccactcatccgcggggagcctcgacaacgttgaaggctattgctggcaacatccaacagcggttgaaagtgctgcggcaggtggaggctgagcggtctaagccgcgtaactcggtgcgccagatcacactggtcacgatcgccatgttcggggggctgctcgtgatcggacggtcgtttctggccccgctggcgacccctcccggtcaggtgctggtggccgtggcggtggtcatgtatgtcatcgcactagtgcagatgtatcggatggcgcggccccgtcgacgcacccggatcatggtcaggaggacccgatgaccattactgctttgtccctgctggccggggccatcgtcactgtcggactgctggtcatcgtggcagcgttccgcccagccccaggccctgacctggttgccgctctggaggtggtgtcgggtcgcacctcaagcgtcgccgagaacgtcgaccagacccggatcgggcggataggtcgcagcgtgacccgcacattccatgtgtcggtgtccccggccatgcgggccgcactgcgactccaaggcacgacccccgaagcgttctacggtcgacgcctgatctgcgcactgatcggggcgatcctgccgtggctgctcaacgcggtagccatcgcggtaggggcgaattccccgaacctactcatcccttcggcgctgtgtgtggcgttagctggcgctggatggatgctgccggcagcacggttgaaggctgcggccgggcccaccaacgatgactcgttcgaagcgctgctggtattcatcgatttggtcgtgctggaacggctcgccaacgaaacctccgtcgacgcgctcaccaatgcggcaaacatgtcggactcgccgctattcgtccagatccgtcaagtcctcaaccgtgcctccctggaaaacgtcgacccgtggaacgggctagaccggctagccgaggacatcaaactgcccgaactcaccgatgtggtctccatcgcccgcctccaaaacgaaggcgcctccctcgtcgacagtttccgggcccgagtcgccgagttgcgcgacgcctacctgctgcgcctgcaacaagaatccaccgccatcacccagcggcttggtttgtggacgatcctgcaagccggctcggtcatgctcatcttgctgggggcggccgccctcacactcatcacagccggataaaccgacatcgtgtcgagcccccatatgggccgcgaacctttcataatgatgcctgtaagcaccacaatattgatcacaacctaacaatgaaggagaaatcatgatgaccgatctcgacctggctaaaaaacagatcacctggctggcggcgcacctgcgttcccggatcgttgacgagcgtggcggtggtagctctaccgtggagacactgatttggattggtgtcatcgtggcgctggtgattggtgtgggcgtcggggtgacggcctatatcaggtcgaagatgcctcactgacgacgatgcgtagcaggttcacaactgatcagcgtggcggtggtagcgcgtcggtggggatgctcctgctgatgcctgcgatcatgctgctggcattcggtgggatcgaggtcgggatgtggtgtcacgcccatcagtcgaccatcgcggcagcccaaagcgccgcggaggctcagcgtgtcgtccatccggtcccggggtcggcacaggaggcagcctcgcagatcactagtcatggcggggtgcgtgatacccggatatcggtcagtgatgacggggccactgtcacggtgaccgtctcaggtcgggccccatcgatgctggggctgcatcttccggctgtgtcgtcgacagcgtcgatgcccaaggagcgcctgtcgtgaggcgaagtgagcgcggtggagcaagtctaagcgtcgaggtgctcatgtgggcgccgatcgcgctggtgatcatcgggtttgttgtgggtatcggccggatgtcgatggcccaggacgcggtgagtggcgcggcgggtgctgcggcccgtgcggcgtcgttggagcgtgatggacagtcggctcagtctgcggcgcagcaggcggcgtcggcgaacctgtcgtccggtgggctggcatgtgcgccgagtgtgagcgtggacacgtcagtgtttgcccgtcctgccgggcaggcgggcacggttcacgccacggtcacgtgtgtcacctcgctgggtcttgggttcgggtcccggacggtgcacgcaacggggtctgccccggtagacacctatcgggaaaggagaggctgagatggcccgtgatgagcgtggtggcggctcggtgtcggtgtggatgctgctcatggtgccggtgattctggtcatggccggcctggtttttgacgggtcccgtcagatatcggcaacccaggcggcccaggacgcggcggttgcggcatcccgcgccggaactgatgcggcagcgacaccgcagcttgctggccacgacggggcggccgtagcagtccaagcggcccgccaggcactatctgctgccggggtggacgggtcggtgcaggaggacgggtcgaccatcacggtgaccacgtctcaaagtcggccgacagtgttcctgtcagcgatcggaatcagccaggtaagggggcatgggcaggcccatgctcagcttgtgggaccgggagaacgcccatgacagtgatacgtcgtatcggtgccctggtggcactgctggtggtgatagccggcttaccggccgggctcgtggccgcaggcgccccgctagtaccctcgggcctgtcatgggcccatgtgcggcatctgttggttaccccagacatgaccgggtcggtgctggtgtggctggtcagcctcatcggctggatcgggtgggcatggttcgccctggccgtcgcagccgaagcggtgacgatgctctcagggcagcggctgcactggcacatgcccggccctcgcctagtgcgccgagtggcagccggtcttctcattgccgcgttcgcggccgcaccggcagccacaagcacggctcacgccgccgaggccacccatgtggcggtcgccgcccaggctggaccggcacacgcggccggcacccaggacagccccgccaccacctctcaggccccggacgcctccaccactccgaaaatctggaagacctacacggtgcgggccaacgactacctgtggaagatcgccgagcactactacggtgacggcgcc

SEQ ID NO: 244 - DNA, 4609 bp, Propionibacterium acnes
gataccgcaaggctgtgtgggatcagctgtgccgctctcccgacatggcagacagcaccctgcggactgactgacactgtggcgccgcggaggtctcccgcggcgtccgctggggcgagtgcatgcctgtcagctcatcttttatcgtcatgtttccccttgtcagagcggtctttgcaaagtgacaacgtcaggggtcttgacgacaacatcctcgacaacatcgtggcggtggtctgtgtctcgtcagttcaacgcaccggggaaagaggcaccgctgatgttcaccaccacaaacaccctcaacgatgagtgggaccagattcgcgccactgagatcgattggcatgactgccctgaactgatgcactgcatcgacgttgatgatgtgttggccgtcattcctgccgcccccgacgccatcttgggctacctcattgcccgggctcagggcggtgacgagttggccacccgcactatcatccaagcgttcacaggcaagcttatcttgatggccacggccaccaaggtgcgccgtactaatgacggcttcaatgatctgttggcgggtctgtgggagacgatcatcacgtacccgttggatcgtcgccctgacaagatcgctgcgaacctcatcctcgacacgttgcaccgggttacccggttctggcgtgctgattcccccgatgaggaagaggctcacggtctggtgcccttccctgacactctcatcgccccagagcccgatgaggacgtcacagctagccaggccatcgccttggcggtggaccgcaactggattaccgaggacctagcccgcctcatgagccatatttactgtgacggtatgactggagctgatgcgggtcgtctgcatggctgcgctccagctacggtgcgatctcgatgccgtgatggtcgggccgtgttgcagcgcaacgccgagacgatcctggccgtctgctgatccctctcttgctcatgcctgccgccaccctacccctacctgctagaaacatagccatgtctccagcaacgcatctagcgtatcttctagcaattgatctagctatgtatatagctgatgatctagctaccatatagctgtgtctccagcccaaaggacagcccaatggcatgcttgccacaggaaggtgcgtcagcctcccgaaatactggaaggagctttaccgtgcaggacatgacctcgaccagaccgattgaccgatccccgttcgaccgcactattgcggtgtggaaccacaaaggcggcacgttcaagacgtccgtcgtggcgaacctgggatacctgttcgccgccggtggcaacaaggtgctgctggtcgacatggacccccaggccaatctcgacattgacttcggtatacccgcgggagaacgtgaacggggcatgggattagccgaggcgctacgtgaggggacggcccttcccccaccgcagcatctcagcgaaaaccttcacctggtcagtggcggcgctgctctcaacgagttcaccgaccccgcatccttagcggccatcctcgaccgagtcaccaccgcacgctacgacctgctagctcaggcccttgccccgctggcctgggactatgacctcatcttcatcgactccgggccggcacaaactctgctgtcccagaccatccttggagtagcccgctggctggtagtgcccacccgcaccgataacgcctcaatcactggcctcgtcgacgttcaagacgccatcgacggggttgcctcctgcaaccctgaccttcaactactcggcgttgtcctagccggcgtgggggcccgggccacccggatcgccgcagataaacgccacgccatcgacacagtgctgggggcaggaaccgttttcgatgcggtcatccactactccgagaaggtgtccgtgctcgcacgccagcagggcaagaccgtcgccgagctagccaacgagtaccacaacacccagcccgcctacacctacctagctaaaggccagaacatccccaacgtcgccaaggcagccgtcagcatcgaaactgattatctgaggctggccaccgagatcagcgaccgcatgttcaccagcgacgagcaggagcctgatcatgactgacgatccgactccatccgagcagaacaaccccaccagcgacgacatgcgcttggccgaagaatgggccaacagcggccgcacagtgggagccctgccgcgccgtcaacggcctcagcgacccacaccccgcaccaccagccaaccccctgtctcgtcccctgacacaccggctccgaaaaaaccccagaagacccccaccagccagcctggccgtcaacggatcaacgtcaccgtctacgttgtgcccgaactccatgagcggctgcgctcccgatcggcggcgacgggggtgacggtctcggatctggtggtgcatgcgttagcgttcgtcgccgatcatgcgggggaggcgatcgccgatgatctgcgcgtcgagacgggccccggcatgggggccggactgttcgatgtgaccccatcgcggccagtaggggtcgccaaaacccagctgggggtgcgaatgacccgccacaacaaggatggtttggaccagctgacccggacgagtggagcccgtgaccgcagccatcttgtgtctgtcgccgtgcgcgactatctcgactccaaccctgtaaagaaaggccgacatgtccgctgatgaaactcctgccgcccggggtgggcgacgctttgatacgaccgtcaagcccaggcgccgtcccatgcttatcgccgccggtatcgccatcgtgatagtcggcgcgctcctcatcactcagttgattcgctccgcccaaaccgagcatcgcgtgctggaagtccacgccgatgtggctcgcggcgaggtcatccgtgacaccgatctggtatcggtgactgtcggccaggtcgacaacgtatcaacggttcccgcagaccagctcgactcactggtcggcaaacgcgccacggcagatcttcgagccggatcactcttgcctgctggggctatcggcccggccgatgtcgttccagctccgggcaagtcgctggtcgggctgaagctagccgccggacagatccctatcggagaccttgctgtcgggacgaagctgcgcctgatccagacgtcggcacccagcggctcatccaccaccactgatagcagcaccaataccgatggccagtcgtgggaggcaacaatggcgaccggcaccaaaaagaccgagcaggtcaccttgatcaacgccgaagtgaactcgcgtgatgccgcccggatcgcccaactgacgtcacagggccgtatcgccgtagtgaaggatccgatccgatgagcaccattgttttgaccagcgtctcgggagccccaggggtcaccacgacagcgatcgggctgggcagggtctggccacaatcgagcctggtcgtcgaggatgacacccaccacgccatgctggcgggctacctgcgagcctcccagcacgccgaaccgaacctggccgcagtggcgaacctgacgtcgactccaaccaacgcccaaacggtgtgggaatctatcgccagacccctacccaccgatgacccagtcggcgggctgcgacgcaaaggcatcctcggcccgcccacgccgtggtctcgcgcaggcatcgacccccgatggggattcatgctggccctgtggcggcaactggaggaggctggcatcgacaccatcatcgatttgggtcgcctagccacaccactgacctcaacgccacacctgatcgccgcacccatcgtcgaggacgccgacatgatcttggtgatgatcgaggcgacactacgcgacatcgccggcgcccgcacgatggtggagggactcgctgagcagatgaacttggccggcgcctaccgacgtctcggactgcttgtccaccgtggcggccaggcccgcggcgtcgccgagttcaatgacaaggagatcacctcggcgttacgactcccggtcatcggggccattacccacgacccggccggagccgcccaactctccgacggggtcgggcagcggttcgacaagtcacgtctggcccactcactatcaaaggtggcggccagcctcgtcgatgccataaacaagcgccacgctgatgacgaggaggatctgtgatggccagttttgctgataatccgttcgacaagctgcgctcccaggatgcggcaagagcttcggtagagcaggagcctgatgccggattagcgtcggagttgttttcgacgtcgtcggggtgggccagctctcagcaggtgtcccaagctcaaccggtgatgacccgttcggagaacgtggattggccggttgtcgcggagctagccagtacggccactgatgaggttgaggctgagatcagcaggtggagttccactcatgatggggtggcgacgctagacattcgccaggccatcgcggagcctgctattgcctcggcggtgtctacgtatgctgaccgacgccagatcgatgtaggggagacctggcctgatctggtacgccagcgataccgcaaggctgtgtgggatcag

SEQ ID NO: 245 - DNA, 4613 bp, Propionibacterium acnes
gcgataccgcaaggctgtgtgggatcagctgtgccgctctcccgacatggcagacagcaccctgcggactgactgacactgtggcgccgcggaggtctcccgcggcgtccgctggggcgagtgcatgcctgtcagctcatcttttatcgtcatgtttccccttgtcagagcggtctttgcaaagtgacaacgtcaggggtcttgacgacaacatcctcgacaacatcgtggcggtggtctgtgtctcgtcagttcaacgcaccggggaaagaggcaccgctgatgttcaccaccacaaacaccctcaacgatgagtgggaccagattcgcgccactgagatcgattggcatgactgccctgaactgatgcactgcatcgacgttgatgatgtgttggccgtcattcctgccgcccccgacgccatcttgggctacctcattgcccgggctcagggcggtgacgagttggccacccgcactatcatccaagcgttcacaggcaagcttatcttgatggccacggccaccaaggtgcgccgtactaatgacggcttcaatgatctgttggcgggtctgtgggagacgatcatcacgtacccgttggatcgtcgccctgacaagatcgctgcgaacctcatcctcgacacgttgcaccgggttacccggttctggcgtgctgattcccccgatgaggaagaggctcacggtctggtgcccttccctgacactctcatcgccccagagcccgatgaggacgtcacagctagccaggccatcgccttggcggtggaccgcaactggattaccgaggacctagcccgcctcatgagccatatttactgtgacggtatgactggagctgatgcgggtcgtctgcatggctgcgctccagctacggtgcgatctcgatgccgtgatggtcgggccgtgttgcagcgcaacgccgagacgatcctggccgtctgctgatccctctcttgctcatgcctgccgccaccctacccctacctgctagaaacatagccatgtctccagcaacgcatctagcgtatcttctagcaattgatctagctatgtatatagctgatgatctagctaccatatagctgtgtctccagcccaaaggacagcccaatggcatgcttgccacaggaaggtgcgtcagcctcccgaaatactggaaggagctttaccgtgcaggacatgacctcgaccagaccgattgaccgatccccgttcgaccgcactattgcggtgtggaaccacaaaggcggcacgttcaagacgtccgtcgtggcgaacctgggatacctgttcgccgccggtggcaacaaggtgctgctggtcgacatggacccccaggccaatctcgacattgacttcggtatacccgcgggagaacgtgaacggggcatgggattagccgaggcgctacgtgaggggacggcccttcccccaccgcagcatctcagcgaaaaccttcacctggtcagtggcggcgctgctctcaacgagttcaccgaccccgcatccttagcggccatcctcgaccgagtcaccaccgcacgctacgacctgctagctcaggcccttgccccgctggcctgggactatgacctcatcttcatcgactccgggccggcacaaactctgctgtcccagaccatccttggagtagcccgctggctggtagtgcccacccgcaccgataacgcctcaatcactggcctcgtcgacgttcaagacgccatcgacggggttgcctcctgcaaccctgaccttcaactactcggcgttgtcctagccggcgtgggggcccgggccacccggatcgccgcagataaacgccacgccatcgacacagtgctgggggcaggaaccgttttcgatgcggtcatccactactccgagaaggtgtccgtgctcgcacgccagcagggcaagaccgtcgccgagctagccaacgagtaccacaacacccagcccgcctacacctacctagctaaaggccagaacatccccaacgtcgccaaggcagccgtcagcatcgaaactgattatctgaggctggccaccgagatcagcgaccgcatgttcaccagcgacgagcaggagcctgatcatgactgacgatccgactccatccgagcagaacaaccccaccagcgacgacatgcgcttggccgaagaatgggccaacagcggccgcacagtgggagccctgccgcgccgtcaacggcctcagcgacccacaccccgcaccaccagccaaccccctgtctcgtcccctgacacaccggctccgaaaaaaccccagaagacccccaccagccagcctggccgtcaacggatcaacgtcaccgtctacgttgtgcccgaactccatgagcggctgcgctcccgatcggcggcgacgggggtgacggtctcggatctggtggtgcatgcgttagcgttcgtcgccgatcatgcgggggaggcgatcgccgatgatctgcgcgtcgagacgggccccggcatgggggccggactgttcgatgtgaccccatcgcggccagtaggggtcgccaaaacccagctgggggtgcgaatgacccgccacaacaaggatggtttggaccagctgacccggacgagtggggcccgtgaccgcagccatcttgtgtctgtcgccgtgcgcgactatctcgactccaaccctgtaaagaaaggccgacatgtccgctgatgaaactcctgccgcccggggtgggcgacgctttgatacgaccgtcaagcccaggcgccgtcccatgcttatcgccgccggtatcgccatcgtgatagtcggcgcgctcctcatcactcagttgattcgctccgcccaaaccgagcatcgcgtgctggaagtccacgccgatgtggctcgcggcgaggtcatccgtgacaccgatctggtatcggtgactgtcggccaggtcgacaacgtatcaacggttcccgcagaccagctcgactcactggtcggcaaacgcgccacggcagatcttcgagccggatcactcttgcctgctggggctatcggcccggccgatgtcgttccagctccgggcaagtcgctggtcgggctgaagctagccgccggacagatccctatcggagaccttgctgtcgggacgaagctgcgcctgatccagacgtcggcacccagcggctcatccaccaccactgatagcagcaccaataccgatggccagtcgtgggaggcaacaatggcgaccggcaccaaaaagaccgagcaggtcaccttgatcaacgccgaagtgaactcgcgtgatgccgcccggatcgcccaactgacgtcacagggccgtatcgccgtagtgaaggatccgatccgatgagcaccattgttttgaccagcgtctcgggagccccaggggtcaccacgacagcgatcgggctgggcagggtctggccacaatcgagcctggtcgtcgaggatgacacccaccacgccatgctggcgggctacctgcgagcctcccagcacgccgaaccgaacctggccgcagtggcgaacctgacgtcgactccaaccaacgcccaaacggtgtgggaatctatcgccagacccctacccaccgatgacccagtcggcgggctgcgacgcaaaggcatcctcggcccgcccacgccgtggtctcgcgcaggcatcgacccccgatggggattcatgctggccctgtggcggcaactggaggaggctggcatcgacaccatcatcgatttgggtcgcctagccacaccactgacctcaacgccacacctgatcgccgcacccatcgtcgaggacgccgacatgatcttggtgatgatcgaggcgacactacgcgacatcgccggcgcccgcacgatggtggagggactcgctgagcagatgaacttggccggcgcctaccgacgtctcggactgcttgtccaccgtggcggccaggcccgcggcgtcgccgagttcaatgacaaggagatcacctcggcgttacgactcccggtcatcggggccattacccatgacccggccggagccgcccaactctccgacggggtcgggcagcggttcgacaagtcacgtctggcccactcactatcaaaggtggcggccagcctcgtcgatgccataaacaagcgccacgctgatgacgaggaggatctgtgatggccagttttgctgataatccgttcgacaagctgcgctcccaggatgcggcaagagcttcggtagagcaggagcctgatgccggattagcgtcggagttgttttcgacgtcgtcggggtgggccagctctcagcaggtgtcccaagctcaaccggtgatgacccgttcggagaacgtggattggccggttgtcgcggagctagccagtacggccactgatgaggttgaggctgagatcagcaggtggagttccactcatgatggggtggcgacgctagacattcgccaggccatcgcggagcctgctattgcctcggcggtgtctacgtatgctgaccgacgccagatcgatgtaggggagacctggcctgatctggtacgccagcgataccgcaaggctgtgtgggatcagct

SEQ ID NO: 246 - DNA, 4903 bp, Propionibacterium acnes
gcgataccgcaaggctgtgtgggatcagctgttcgggatggggcggttgcagccgctgttcgaaatcagcgacgccgaaaacatcatcgtggtgggtaaccatgaggtggttgtcgaccacaacgatggttcccggtcaacgctgccgccggtggccgactcggatgccgagctggaatcccagatcgcccggatggcgaggaatgcgaccccgcggcgagccttcgacgccgatcacaccgatgtgacgatcatgcaccaacagaagttccgtatccacgcgatctcagcggaagtgtcattgcaaccgtcggtggtcatccgccaacatttgctcacccaaatcagtctgggggacctgtcccagcggggaatgatgccggtggaagtggcccggttcctcgatgaggcggtacaagctggcaagtccatcgtggtcgccggcgagcagggggcaggcaagacgacgtttttacgagcgttgatccacgccattccgatgcgggagcggttcgccacgttggagaccgatcaggagttgttcgctcatctgatgcctggccgggaaaacacgctggtgctgttcgcccgtgatggtaacggcgaggtggatccggcgactggcacccagcacggcgctatcgagatcgcccagctgattcctcctagtctgcgccaggcgttaactagggtcattgtcggtgaggtgcgcggcaatgaggcttcggccatgttccaggctatgcagtcggggactggcactatgagcagtatccactccccgcgagcctctgaggtgccgtcccggctagcccaaatgatttcgatgggcccggtctacgatctggatcaggccatgctgcagatcggtcattcgatcgactacatcgtctttgttcgtaagcgtgacctgcctgatgggagccggctgcgatttgttgagcagatccgttcagtctcgcctggtgattcgacaactcccagtcttggcgaggtgtacacggctgactcgtggacaggccagccgcttacgccactcatgcctggttcggccgccgacgagctgtctcatttcgcccgagacctggattactgcgaggcccactcatgaacactcctgcactaaccagcgccctcatcgtgaccgggttggggctgatcctggccatcgacgggctggtcccggcgccgcctcgacctggtgccccgctgagcccggcccagaggtgggctcggctcacccaccgtcccacaggagcggccgggcgtcgccgggatttgcgttgggggttggctgttctcgtcggcgtcgtgctgtttgtgctcaccgggtgggtggctgcgctggcgttgggccccatcattgtgttgttggcccccaccctgctgggggcggccccaccgaccgatattccgctgatggaggcgttggatcggtgggtgcgtcaggtcgctgcggtgctgccacaggggcgagacatcatcacagcggtgcggatctcacggccgcgggccccgaagctgatcgccgggtcggtggatcaactggtgtcccggttggatggccgtatggagccgagagaggcgttccagcggatggccgacgagctggactcggctgaggctgacgcggtgctggcctctctggcgttggcggccactcatccgcggggagcctcgacaacgttgaaggctattgctggcaacatccaacagcggttgaaagtgctgcggcaggtggaggctgagcggtctaagccgcgtaactcggtgcgccagatcacactggtcacgatcgccatgttcggggggctgctcgtgatcggacggtcgtttctggccccgctggcgacccctcccggtcaggtgctggtggccgtggcggtggtcatgtatgtcatcgcactagtgcagatgtatcggatggcgcggccccgtcgacgcacccggatcatggtcaggaggacccgatgaccattactgctttgtccctgctggccggggccatcgtcactgtcggactgctggtcatcgtggcagcgttccgcccagccccaggccctgacctggttgccgctctggaggtggtgtcgggtcgcacctcaagcgtcgccgagaacgtcgaccagacccggatcgggcggataggtcgcagcgtgacccgcacattccatgtgtcggtgtccccggccatgcgggccgcactgcgactccaaggcacgacccccgaagcgttgtacggtcgacgcctgatctgcgcactgatcggggcgatcctgccgtggctgctcaacgcggtagccatcgcggtaggggcgaattccccgaacctactcatcccttcggcgctgtgtgtggcgttagctggcgctggatggatgctgccggcagcacggttgaaggctgcggccgggcccaccaacgatgactcgttcgaagcgctgctggtattcatcgatttggtcgtgctggaacggctcgccaacgaaacctccgtcgacgcgctcaccaatgcggcaaacatgtcggactcgccgctattcgtccagatccgtcaagtcctcaaccgtgcctccctggaaaacgtcgacccgtggaacgggctagaccggctagccgaggacatcaaactgcccgaactcaccgatgtggtctccatcgcccgcctccaaaacgaaggcgcctccctcgtcgacagtttccgggcccgagtcgccgagttgcgcgacgcttacctgctgcgcctgcaacaagaatccaccgccatcacccagcggcttggtttgtggacgatcctgcaagccggctcggtcatgctcatcttgctgggggcggccgccctcacactcatcacagccggataaaccgacatcgtgtcgagcccccatatgggccgcgaacctttcataatgatgcctgtaagcaccacaatattgatcacaacctaacaatgaaggagaaatcatgatgaccgatctcgacctggctaaaaaacagatcacctggctggcggcgcacctgcgttcccggatcgttgacgagcgtggcggtggtagctctaccgtggagacactgatttggattggtgtcatcgtggcgctggtgattggtgtgggcgtcggggtgacggcctatatcaggtcgaagatgcctcactgacgacgatgcgtagcaggttcacaactgatcagcgtggcggtggtagcgcgtcggtggggatgctcctgctgatgcctgcgatcatgctgctggcattcggtgggatcgaggtcgggatgtggtgtcacgcccatcagtcgaccatcgcggcagcccaaagcgccgcggaggctcagcgtgtcgtccatccggtcccggggtcggcacaggaggcagcctcgcagatcactagtcatggcggggtgcgtgatacccggatatcggtcagtgatgacggggccactgtcacggtgaccgtggtgggccgggccccatcgatgctggggctgcatcttccggctgtgtcgtcgacagcgtcgatgcccaaggagcgcctgtcgtgaggcgaagtgagcgcggtggagcaagtctaagcgtcgaggtgctcatgtgggcgccgatcgcgctggtgatcatcgggtttgttgtgggtatcggccggatgtcgatggcccaggacgcggtgagtggcgcggctggtgctgcggcccgtgcggcgtcgttggagcgtgatggacagtcggctcagtctgcggcgcagcaggcggcgtcggcgaacctgtcgtccggtgggctggcatgtgcgccgagtgtgagcgtggacacgtcagtgtttgcccgtcctgccgggcaggcgggcacggttcacgccacggtcacgtgtgtcacctcgctgggtcttgggttcgggtcccggacggtgcacgcaacggggtctgccccggtagacacctatcgggaaaggagaggctgagatggcccgtgatgagcgtggtggcggctcggtgtcggtgtggatgctgctcatggtgccggtgattctggtcatggccggcctggtttttgacgggtcccgtcagatatcggcaacccaggcggcccaggacgcggcggttgcggcatcccgcgccggaactgatgcggcagcgacaccgcagcttgctggccacgacggggcggccgtagcagtccaagcggcccgccaggcactatctgctgccggggtggacgggtcggtgcaggaggacgggtcgaccatcacggtgaccacgtctcaaagtcggccgacagtgttcctgtcagcgatcggaatcagccaggtgaccgggcatgggcaggcccatgctcagcttgtgggaccgggagaacgcccatgacagtgatacgtcgtatcggtgccctggtggcactgctggtggtgatagccggcttaccggccgggctcgtggccgcaggcgccccgctagtaccctcgggcctgtcatgggcccatgtgcggcatctgttggttaccccagacatgaccgggtcggtgctggtgtggctggtcagcctcatcggctggatcgggtgggcatggttcgccctggccgtcgcagccgaagcggtgacgatgctctcagggcagcggctgcactggcacatgcccggccctcgcctagtgcgccgagtggcagccggtcttctcattgccgcgttcgcggccgcaccggcagccacaagcacggctcacgccgccgaggccacccatgtggcggtcgccgcccaggctggaccggcacacgcggcccccgcccaggacagccccgccaccacctctcaggccccggacgcctccaccactccgaaaatctggaagacctacacggtgcgggccaacgactacctgtggaagatcgccgagcactactacggtgacggcgcc

SEQ ID NO: 247 - DNA, 4612 bp, Propionibacterium acnes
gcgataccgcaaggctgtgtgggatcagctgtgccgctcccccgacatggcagacagcaccctgcggactgactgacactgtggcgccgcggaggtctcccgcggcgtccgctggggcgagtgcatgcctgtcagctcatcttttatcgtcatgtttccccttgtcagagcggtctttgcaaagtgacaacgtcaggggtcttgacgacaacatcctcgacaacatcgtggcggtggtctgtgtcttgtcagttcaacgcaccggggaaagaggcaccgctgatgttcaccaccacaaacaccctcaacgatgagtgggaccagattcgcgccactgagatcgattggcatgactgccctgaactgatgcactgcatcgacgttgatgatgtgttggccgtcattcctgccgcccccgacgccatcttgggctacctcattgcccgggctcagggcggtgacgagttggccacccgcactatcatccaagcgttcacaggcaagcttattttgatggccacggccaccaaggtgcgccgtactaatgacggcttcaatgatctgttggcgggtctgtgggagacgatcatcacgtacccgttggatcgtcgccctgacaagatcgctgcgaacctcatcctcgacacgttgcaccgggttacccggttttggcgtgctgattcccccgatgaggaagaggctcacggtctggtgcccttccctgacactctcatcgccccagagcccgatgaggacgtcacagctagccaggccatcgccttggcggtggaccgcaactggattaccgaggacctagcccgcctcatgagccatatttactgtgacggtatgactggagctgatgcgggtcgtctgcatggctgcgctccagctacggtgcgatctcgatgccgtgatggtcgggccgtgttgcagcgcaacgccgagacgatcctggccgtctgctgatccctctcttgctcatgcctgccgccaccctacctctacctgctagaaacatagccatgtctccagcaacgcatctagcgtatcttctagcaattgatctagctatcatatagctgatgatctagctatcatatagctgtgtctccagcccaaaggacagcccaatggcatgcttgccacaggaaggtgcgtcagcctcccgaaatactggaaggagctttaccgtgcaggacatgacctcgaccagaccgattgaccgatccccgttcgaccgcactattgcggtgtggaaccacaaaggcggcacgttcaagacgtccgtcgtggcgaacctgggatacctgttcgccgccggtggcaacaaggtgttgatggtcgacatggacccccaggccaatctcgacattgacttcggtatacccgcgggagaacgtgaacggggcatgggattagccgaggcgctacgtgaggggacggcccttcccccaccgcagcatctcagcgaaaaccttcacctggtcagtggcggcgctgctctcaacgagttcaccgaccccgcatccttagcggccatcatcgagcgggtcaccaccgcacgctacgacctgctagctcaggcccttgccccgctggcctgggactatgacctcatcttcatcgactccgggccggcccaaactctgctgtcccagaccatccttggagtagcccgctggctggtagtgcccacccgcaccgataacgcctcaatcactggcctcgtcgacgttcaagacgccatcgacggggttgcctcctgcaaccctgaccttcaactactcggcgttgtcctagccggcgtgggggcccgggccacccggatcgccgcagataaacgccacgccatcgacacagtgctgggggcaggaaccgttttcgatgcggtcatccactactccgagaaggtgtccgtgctcgcacgccagcagggcaagaccgtcgccgagctagccaacgagtaccacaacacccagcccgcctacacctacctagctaaaggccagaacatccccaacgtcgccaaggcagccgtcagcatcgaaactgattatctgaggctggccaccgagatcagcgaccgcatgttcaccagcgacgagcaggagcctgatcatgactgacgatccgactccatccgagcagaacaaccccaccagcgacgacatgcgcttggccgaagaatgggccaacagcggccgcacagtgggagccctgccgcgccgtcaacggcctcagcgacccacaccccgcaccaccagccaaccccctgtctcgtcccctgacacaccggctccgaaaaaaccccagaagacccccaccagccagcctggccgtcaacggatcaacgtcaccgtctacgttgtgcccgaactccatgagcggctgcgctcccgatcggcggcgacgggggtgacggtctcggatctggtggtgcatgcgttagcgttcgtcgccgatcatgcgggggaggcgatcgccgatgatctgcgcgtcgagacgggccccggcatgggggccggactgttcgatgtgaccccatcgcggccagtaggggtcgccaaaacccagctgggggtgcgaatgacccgccacaacaaggatggtttggaccagctgacccggacgagtggagcccgtgaccgcagccatcttgtgtctgtcgccgtgcgcgactatctcgactccaaccctgtaaagaaaggccgacatgtccgctgatgaaactcctgccgcccggggtgggcgacgctttgatacgaccgtcaagcccaggcgccgtcccatgcttatcgccgccggtatcgccatcgtgatagtcggcgcgctcctcatcactcagttgattcgctccgcccaaaccgagcatcgcgtgctggaagtccacgccgatgtggctcgcggcgaggtcatccgtgacaccgatctggtatcggtgactgtcggccaggtcgacaacgtatcaacggttcccgcagaccagctcgactcactggtcggcaaacgcgccacggcagatcttcgagccggatcactcttgcctgctggggctatcggcccggccgatgtcgttccagctccgggcaagtcgctggtcgggctgaagctagccgccggacagatccctatcggagaccttgctgccgggacgaagctgcgcctgatccagacgtcggcacccagcggctcatccaccaccactgatagcagcaccaataccgatggccagtcgtgggaggcaacaatggcgaccggcaccaaaaagaccgagcaggtcaccttgatcaacgccgaagtgaactcgcgtgatgccgcccggatcgcccaactgacgtcacagggccgtatcgccgtagtgaaggatccgatccgatgagcaccattgttttgaccagcgtctcgggagccccaggggtcaccacgacagcgatcgggctgggcagggtctggccacaatcgagcctggtcgtcgaggatgacacccaccacgccatgctggcgggctacctgcgagcctcccagcacgccgaaccgaacctggccgcagtggcgaacctgacgtcgactccaaccaacgcccaaacggtgtgggaatctatcgccagacccctacccaccgatgacccagtcggcgggatgcgacgcaaaggcatcctcggcccgcccacgccgtggtctcgcgcaggcatcgacccccgatggggattcatgctggccctgtggcggcaactggaggaggctggcatcgacaccatcatcgatttgggtcgcctagccacaccactgacctcaacgccacacctgatcgccgcacccatcgtcgaggacgccgacatgatcttggtgatgatcgaggcgacactacgcgacatcgccggcgcccgcacgatggtggagggactcgctgagcagatgaacttggccggcgcctaccgacgtctcggactgcttgtccaccgtggcggccaggcccgcggcgtcgccgagttcaatgacaaggagatcacctcggcgttacgactcccggtcatcggggccattacccatgacccggccggagccgccgaactctccgacggggtcgggcagcggttcgacaagtcacgtctggcccactcactatcaaaggtggcggccagcctcgtcgatgccataaacaagcgccacgctgatgacgaggaggatctgtgatggccagttttgctgataatccgttcgacaagctgcgctcccaggatgcggcaagagcttcggtagagcaggagcctgatgccggattagcgtcggagttgttttcgacgtcgtcggggtgggccagctctcagcaggtgtcccaagctcaaccggtgatgacccgttcggagaacgtggattggccggttgtcgcggagctagccagtacggccactgatgaggttgaggctgagatcagccggtggagttccactcatgatggggtggcgacgctagacattcgccaggccatcgcggagcctgctattgcctcggcggtgtctacgtatgctgaccgacgccagatcgatgtaggggagacctggcctgatctggtacgccagcgataccgcaaggctgtgtgggatcagct

SEQ ID NO: 248 - DNA, 4896 bp, Propionibacterium acnes
gcgataccgcaaggctgtgtgggatcagctgttcgggatggggcggttgcagccgctgttcgaaatcagcgacgccgaaaacatcatcgtggtgggtaaccatgaggtggttgtcgaccacaacgatggttcccggtcaacgctgccgccggtggccgactcggatgccgagctggaatcccagatcgcccggatggcgaggaatgcgaccccgcggcgagccttcgacgccgatcacaccgatgtgacgatcatgcaccaacagaagttccgtatccacgcgatctcagcggaagtgtcattgcaaccgtcggtggtcatccgccaacatttgctcacccaaatcagtctgggggacctgtcacatcgcggaatgatgccggtggaagtggcccggttcctcgatgaggcggtacaagctggcaagtccatcgtggtcgccggcgagcagggggcaggcaagacgacgtttttacgagcgttgatccacgccattccgatgcgggagcggttcgccacgttggagaccgatcaggagttgttcgctcatctgatgcctggccgggaaaacacgctggtgctgttcgcccgtgatggtaacggcgaggtggatccggcgactggcacccagcacggcgctatcgagatcgcccagctgattcctcctagcctgcgccaggcgttaactagggtcattgtcggtgaggtgcgcggcaatgaggcctcggccatgttccaggccatgcagtcgggtacaggcaccatgagcagtatccactccccgcgagcctctgaggtgccgtcccggctagcccaaatgatttcgatgggcccggtctacgatctggatcaggccatgctgcagatcggtcattcgatcgactacatcgtctttgttcgtaagcgtgacctgcctgatgggagccggctgcgatttgttgagcagatccgttcagtctcgcctggtgattcgacaactcccagtcttggcgaggtgtacacggctgactcgtggacaggccagccgcttacgccactcatgcctggttcggccgccgacgagctgtctcacttcgcccgagacctggattactgcgaggcccactcatgaacactcccgcactaaccagcgccctcatcgtgaccgggctagggctgatcctggccatcgacgggctggtcccggcgccgcctcgacctggtgccccgctgagcccggcccaaaggtgggctcggctcacccaccgtcccactggtgcggccgggcgtcgccgggatttgcgttgggggttggctgttcttgtcggtgtcgtgctgtttgtgctcaccgggtgggtggctgcgctggcgctgggccccatcattgtgttgttggcccccaccctgctgggggcggccccaccgaccgatattccgctgatggaggcgctggatcgctgggtgcgtcaggtcgctgcggtgctgccacaggggcgcgacatcatcacagcggtgcggatctcacggccgcgggccccgaagctgatcgccgggtcggtggatcaactggtgtcccggttggatggccgtatggagccgagggaggcgttccagcggatggccgacgagctggactcggctgaggctgacgcggtgctggcctcactagcgttggcggccactcatccgcggggagcctcgacaacgttgaaggctattgctggcaacatccaacagcggttgaaagtgctgcggcaggtggaggctgaacggtctaagccgcgtaactcggtgcgccagatcacactggtcacgatcgccatgttcggggggctgctcgtgatcggacggtcgtttctggccccgctggcgacccctcccggtcaggtgctggtggccgtggcggtggtcatgtatgtcatcgcactagtgcagatgtatcggatggcgcggccccgtcgacgcacccggatcatggtcaggaggacccgatgaccattactgctttgtccctgctagccggggccatcgtcactgtcggactgctggtcatcgtggcagcgttccgcccagccccaggccctgacctggttgccgctctggaggtggtgtcgggtcgcacctcaagcgtcgccgagaacgtcgaccagacccggatcgggcggataggtcgcagcgtgacccgcacattccatgtgtcggtgtccccggccatgcgggccgcactgcgactccaaggcacgacccccgaagcgttctacggtcgacgcctgatctgcgcactgatcggggcgatcctgccgtggctgctcaacgcggtagccatcgcggtaggggcgaattccccgaacctactcatcccttcggcgctgtgtgtggcgttagctggcgctggatggatgctgccggcagcacggttgaaggctgcggccgggcccaccaacgatgactcgttcgaagcgctgctggtattcatcgatttggtcgtgctggaacggctcgccaacgaaacctccgtcgacgcgctcaccaatgcggcaaacatgtcggactcgccgctattcgtccagatccgtcaagtcctcaaccgtgcctccctggaaaacgtcgacccgtggaacgggctagaccggctagccgaggacatcaaactgcccgaactcaccgatgtggtctccatcgcccgcctccaaaacgaaggcgcctccctcgtcgacagtttccgggcccgagtcgccgagttacgcgacgcctacctgctgcgcctgcaacaagaatccaccgccatcacccagcggcttggtttgtggacgatcctgcaagccggctcggtcatgctcatcttgctgggggcggccgccctcacactcatcacagccggataaaacgacaccgtgtcgagcccccatatgggccgcgaacctttcataatgatgcctgtaagcaccacaatattgatcacaacctaacaatgaaggagaaatcatgatgaccgatctcgacctggctaaaaaacagatcacctggctggcggcgcacctgcgttcccggatcgttgacgagcgtggcggtggtagctctaccgtggagacactgatttggattggtgtcatcgtggcgctggtgattggtgtgggcgtcggggtgacggcctatatcaggtcgaagatgcctcactgacgacgatgcgtagcaggttcacaactgatcagcgtggcggtggtagcgcgtcggtggggatgctcctgctgatgcctgcgatcatgctgctggcattcggtgggatcgaggtcgggatgtggtgtcacgcccatcagtcgaccatcgcggcagcccaaagcgccgcggaggctcagcgtgtcgtccatccggtcccggggtcggcacaggaggcagcctcgcagatcactagtcatggcggggtgcgtgatgcgcggatatcggtcagtgatgacggggccactgtcacggtgaccgtctcaggtcgggccccatcgatgctggggctgcatcttccggctgtgtcgtcgacagcgtcgatgcccaaggagcgcctgtcgtgaggcgaagtgagcgcggtggagcaagtctaagcgtcgaggtgctcatgtgggcgccgatcgcgctggtgatcatcgggtttgttgtgggtatcggccggatgtcgatggcccaggacgcggtgagtggcgcggcgggtgctgcggcccgtgcggcgtcgttggagcgtgatggacagtcggctcagtctgcggcgcagcaggcggcgtcggcgaacctgtcgtccggtgggctggcatgtgcgccgagtgtgagcgtggacacgtcagtgtttgcccgtcctgccgggcaggcgggcacggttcacgccacggtcacgtgtgtcacctcgctgggtcttgggttcgggtcccggacggtgcacgcaacggggtctgccccggtagacacctatcgggaaaggagaggctgagatggcccgcgatgagcgtggtggcggctcggtgtcggtgtggatgctgctcatggtgccggtgattctggtcatggccggcctggtttttgacgggtcccgtcagatatcggcaacccaggcggcccaggacgcggcggttgcggcatcccgcgccggaactgatgcggcagcgacaccgcagcttgctggccacgacggggcggccgtagcagtccaagcggcccgccaggcactatctgctgccggggtggacgggtcggtgcaggaggacgggtcgaccatcacggtgaccacgtctcaaagtcggccgacagtgttcctgtcagcgatcggaatcagccaggtaagggggcatgggcaggcccatgctcagcttgtgggaccgggagaacgcccatgacagtgatacgtcgtatcggtgccctggtggcactgctggtggtgatagccggcttaccggccgggctcgtggccgcaggcgccccgctagtaccctcgggcctgtcatgggcccatgtgcggcatctgttggttaccccagacatgaccgggtcggtgctggtgtggctggtcagcctcatcggctggatcgggtgggcatggttcgccctggccgtcgcagccgaagcggtgacgatgctctcagggcagcggctgcactggcacatgcccggccctcgcctagtgcgccgagtggcagccggtcttctcattgccgcgttcgcggccgcaccggcagccacaagcacggctcacgccgccgaggccacccatgtggcggtcgccgcccaggctggaccggcacacgcggcccccgcccaggacagccccgccaccacctctcaggccccggacgcctccaccactccgaaaatctggaagacctacacggtgcgggccaacgactacctgtggaagatcgccgagcactactacggtga

SEQ ID NO: 249 - DNA, 4892 bp, Propionibacterium acnes
gataccgcaaggctgtgtgggatcagctgttcgggatggggcggttgcagccgctgttcgaaatcagcgacgccgaaaacatcatcgtggtgggtaaccatgaggtggttgtcgaccacaacgatggttcccggtcaacgctgccgccggtggccgactcggatgccgagctggaatcccagatcgcccggatggcgaggaatgcgaccccgcggcgagccttcgacgccgatcacaccgatgtgacgatcatgcaccaacagaagttccgtatccacgcgatctcagcggaagtgtcattgcaaccgtcggtggtcatccgccaacatttgctcacccaaatcagtctgggggacctgtcacatcgcggaatgatgccggtggaagtggcccggttcctcgatgaggcggtacaagctggcaagtccatcgtggtcgccggcgagcagggggcaggcaagacgacgtttttacgagcgttgatccacgccattccgatgcgggagcggttcgccacgttggagaccgatcaggagttgttcgctcatctgatgcctggccgggaaaacacgctggtgctgttcgcccgtgatggtaacggcgaggtggatccggcgactggcacccagcacggcgctatcgagatcgcccagctgattcctcctagcctgcgccaggcgttaactagggtcattgtcggtgaggtgcgcggcaatgaggcctcggccatgttccaggccatgcagtcgggtacaggcaccatgagcagtatccactccccgcgagcctctgaggtgccgtcccggctagcccaaatgatttcgatgggcccggtctacgatctggatcaggccatgctgcagatcggtcattcgatcgactacatcgtctttgttcgtaagcgtgacctgcctgatgggagccggctgcgatttgttgagcagatccgttcagtctcgcctggtgattcgacaactcccagtcttggcgaggtgtacacggctgactcgtggacaggccagccgcttacgccactcatgcctggttcggccgccgacgagctgtctcacttcgcccgagacctggattactgcgaggcccactcatgaacactcccgcactaaccagcgccctcatcgtgaccgggctagggctgatcctggccatcgacgggctggtcccggcgccgcctcgacctggtgccccgctgagcccggcccaaaggtgggctcggctcacccaccgtcccactggtgcggccgggcgtcgccgggatttgcgttgggggttggctgttcttgtcggtgtcgtgctgtttgtgctcaccgggtgggtggctgcgctggcgctgggccccatcattgtgttgttggcccccaccctgctgggggcggccccaccgaccgatattccgctgatggaggcgctggatcgctgggtgcgtcaggtcgctgcggtgctgccacaggggcgcgacatcatcacagcggtgcggatctcacggccgcgggccccgaagctgatcgccgggtcggtggatcaactggtgtcccggttggatggccgtatggagccgagggaggcgttccagcggatggccgacgagctggactcggctgaggctgacgcggtgctggcctcactagcgttggcggccactcatccgcggggagcctcgacaacgttgaaggctattgctggcaacatccaacagcggttgaaagtgctgcggcaggtggaggctgaacggtctaagccgcgtaactcggtgcgccagatcacactggtcacgatcgccatgttcggggggctgctcgtgatcggacggtcgtttctggccccgctggcgacccctcccggtcaggtgctggtggccgtggcggtggtcatgtatgtcatcgcactagtgcagatgtatcggatggcgcggccccgtcgacgcacccggatcatggtcaggaggacccgatgaccattactgctttgtccctgctagccggggccatcgtcactgtcggactgctggtcatcgtggcagcgttccgcccagccccaggccctgacctggttgccgctctggaggtggtgtcgggtcgcacctcaagcgtcgccgagaacgtcgaccagacccggatcgggcggataggtcgcagcgtgacccgcacattccatgtgtcggtgtccccggccatgcgggccgcactgcgactccaaggcacgacccccgaagcgttctacggtcgacgcctgatctgcgcactgatcggggcgatcctgccgtggctgctcaacgcggtagccatcgcggtaggggcgaattccccgaacctactcatcccttcggcgctgtgtgtggcgttagctggcgctggatggatgctgccggcagcacggttgaaggctgcggccgggcccaccaacgatgactcgttcgaagcgctgctggtattcatcgatttggtcgtgctggaacggctcgccaacgaaacctccgtcgacgcgctcaccaatgcggcaaacatgtcggactcgccgctattcgtccagatccgtcaagtcctcaaccgtgcctccctggaaaacgtcgacccgtggaacgggctagaccggctagccgaggacatcaaactgcccgaactcaccgatgtggtctccatcgcccgcctccaaaacgaaggcgcctccctcgtcgacagtttccgggcccgagtcgccgagttacgcgacgcctacctgctgcgcctgcaacaagaatccaccgccatcacccagcggcttggtttgtggacgatcctgcaagccggctcggtcatgctcatcttgctgggggcggccgccctcacactcatcacagccggataaaacgacaccgtgtcgagcccccatatgggccgcgaacctttcataatgatgcctgtaagcaccacaatattgatcacaacctaacaatgaaggagaaatcatgatgaccgatctcgacctggctaaaaaacagatcacctggctggcggcgcacctgcgttcccggatcgttgacgagcgtggcggtggtagctctaccgtggagacactgatttggattggtgtcatcgtggcgctggtgattggtgtgggcgtcggggtgacggcctatatcaggtcgaagatgcctcactgacgacgatgcgtagcaggttcacaactgatcagcgtggcggtggtagcgcgtcggtggggatgctcctgctgatgcctgcgatcatgctgctggcattcggtgggatcgaggtcgggatgtggtgtcacgcccatcagtcgaccatcgcggcagcccaaagcgccgcggaggctcagcgtgtcgtccatccggtcccggggtcggcacaggaggcagcctcgcagatcactagtcatggcggggtgcgtgatgcgcggatatcggtcagtgatgacggggccactgtcacggtgaccgtctcaggtcgggccccatcgatgctggggctgcatcttccggctgtgtcgtcgacagcgtcgatgcccaaggagcgcctgtcgtgaggcgaagtgagcgcggtggagcaagtctaagcgtcgaggtgctcatgtgggcgccgatcgcgctggtgatcatcgggtttgttgtgggtatcggccggatgtcgatggcccaggacgcggtgagtggcgcggcgggtgctgcggcccgtgcggcgtcgttggagcgtgatggacagtcggctcagtctgcggcgcagcaggcggcgtcggcgaacctgtcgtccggtgggctggcatgtgcgccgagtgtgagcgtggacacgtcagtgtttgcccgtcctgccgggcaggcgggcacggttcacgccacggtcacgtgtgtcacctcgctgggtcttgggttcgggtcccggacggtgcacgcaacggggtctgccccggtagacacctatcgggaaaggagaggctgagatggcccgcgatgagcgtggtggcggctcggtgtcggtgtggatgctgctcatggtgccggtgattctggtcatggccggcctggtttttgacgggtcccgtcagatatcggcaacccaggcggcccaggacgcggcggttgcggcatcccgcgccggaactgatgcggcagcgacaccgcagcttgctggccacgacggggcggccgtagcagtccaagcggcccgccaggcactatctgctgccggggtggacgggtcggtgcaggaggacgggtcgaccatcacggtgaccacgtctcaaagtcggccgacagtgttcctgtcagcgatcggaatcagccaggtaagggggcatgggcaggcccatgctcagcttgtgggaccgggagaacgcccatgacagtgatacgtcgtatcggtgccctggtggcactgctggtggtgatagccggcttaccggccgggctcgtggccgcaggcgccccgctagtaccctcgggcctgtcatgggcccatgtgcggcatctgttggttaccccagacatgaccgggtcggtgctggtgtggctggtcagcctcatcggctggatcgggtgggcatggttcgccctggccgtcgcagccgaagcggtgacgatgctctcagggcagcggctgcactggcacatgcccggccctcgcctagtgcgccgagtggcagccggtcttctcattgccgcgttcgcggccgcaccggcagccacaagcacggctcacgccgccgaggccacccatgtggcggtcgccgcccaggctggaccggcacacgcggcccccgcccaggacagccccgccaccacctctcaggccccggacgcctccaccactccgaaaatctggaagacctacacggtgcgggccaacgactacctgtggaagatcgccgagcactactacggt

SEQ ID NO: 250 - DNA, 4617 bp, Propionibacterium acnes
gcgataccgcaaggctgtgtgggatcagctgtgccgctcccccgacatggcagacagcaccgttgcatgagaactgactgacactgtggcgccgcggaggtctcccgcggcgtccgctggggcgagtgcatgcctgtcagctcatcttttatcgtcatgtttccccttgtcagagcggtctttgcaaagtgacaacgtcaggggtcttgacgacaacatcctcgacaacatcgtggcggtggtctgtgtctcgtcagttcaacgcaccggggaaagaggcaccgctgatgttcaccaccacaaacaccctcaacgatgaatgggaccagattcgcgccactgagatcgattggcatgactgccctgaactgatgcactgcatcgacgttgatgatgtgttggccgtcattcctgccgcccccgacgccatcttgggctacctcattgcccgggctcagggcggtgacgagttggccacccgcactatcatccaagcgttcacaggcaagcttattttgatggccacggccaccaaggtgcgccgtactaatgacggcttcaatgatctgttggcgggtctgtgggagacgatcatcacgtacccgttagatcgtcgccctgacaagatcgctgcgaacctcatcctcgacacgttgcaccgggttacccggttttggcgtgctgattcccccgatgaggaagaggctcacggtctggtgcccttccctgacactctcatcgccccagagcccgatgaggacgtcacagctagccaggccatcgccttggcggtggaccgcaactggattaccgaggacctagcccgcctcatgagccatatttactgtgacggtatgactggagctgatgcgggtcgtctgcatggctgcgctccagctacggtgcgatctcgatgccgtgatggtcgggccgtgttgcagcgcaacgccgagacgatcctggccgtctgctgatccctctcttgctcatgcctgccgccaccctacccctacctgctagaaacatagccatgtctccagcaacgcatctagcgtatcttctagcaattgatctagctatcatatagctgatgatctagctatcatatagctgtgtctccagcccaaaggacagcccaatggcatgcttgccacaggaaggtgcgtcagcctcccgaaatactggaaggagctttaccgtgcaggacatgacctcgaccagaccgattgaccgatccccgttcgaccgcactattgcggtgtggaaccacaaaggcggcacgttcaagacgtccgtcgtggcgaacctgggatacctgttcgccgccggtggcaacaaggtgttgatggtcgacatggacccccaggccaatctcgacattgacttcggtatacccgcgggagaacgtgaacggggcatgggattagccgaggcgctacgtgaggggacggcccttcccccaccgcagcatctcagcgaaaaccttcacctggtcagtggcggcccggccctccacgagttcaccgaccccgcatccttagcggccatcctcgaccgagtcaccaccgcacgctacgacctgctagctcaggcccttgccccgctggcctgggactatgacctcatcttcatcgactccgggccggcccaaactctgctgtcccagaccatccttggagtagcccgctggctggtagtgcccacccgcaccgataacgcctcaatcactggcctcgtcgacgttcaagacgccatcgacggggttgcctcctgcaaccctgaccttcaactactcggcgttgtcctagccggcgtgggggcccgggccacccggatcgccgcagataaacgccacgccatcgacacagtgctgggggcaggaaccgttttcgatgcggtcatccactactccgagaaggtgtccgtgctcgcacgccagcagggcaagaccgtcgccgagctagccaacgactaccacaacacccagcccgcctacacctacctagctaaaggccagaacatccccaacgtcgccaaggcagccgtcagcatcgaaactgattatctgaggctggccaccgagatcagcgaccgcatgttcaccagcgacgagcaggagcctgatcatgactgacgatccgactccatccgagcagaacaaccccaccagcgacgacatgcgcttggccgaagaatgggccaacagcggccgcacagtgggagccctgccgcgccgtcaacggcctcagcgacccacaccccgcaccaccagccaaccccctgtctcgtcccctgacacaccggctccgaaaaaaccccagaagacccccaccagccagcctggccgtcaacggatcaacgtcaccgtctacgttgtgcccgaactccatgagcggctgcgctcccgatcggcggcgacgggggtgacggtctcggatctggtggtgcatgcgttagcgttcgtcgccgatcatgcgggggaggcgatcgccgatgatctgcgcgtcgagacgggccccggcatgggggccggactgttcgatgtgaccccatcgcggccagtaggggtcgccaaaacccagctgggggtgcgaatgacccgccacaacaaggatggtttggaccagctgacccggacgagtggagcccgtgaccgcagccatcttgtgtctgtcgccgtgcgcgactatctcgactccaaccctgtaaagaaaggccgacatgtccgctgatgaaactcctgccgcccggggtgggcgacgctttgatacgaccgtcaagcccaggcgccgtcccatgcttatcgccgccggtatcgccatcgtgatagtcggcgcgctcctcatcactcagttgattcgctccgcccaaaccgagcatcgcgtgctggaagtccacgccgatgtggctcgcggcgaggtcatccgtgacaccgatctggtatcggtgactgtcggccaggtcgacaacgtatcaacggttcccgcagaccagctcgactcactggtcggcaaacgcgccacggcagatcttcgagccggatcactcttacctgctggggctatcggcccggccgatgtcgttccagctccgggcaagtcgctggtcgggctgaagctagccgccggacagatccctatcggagaccttgctgccgggacgaagctgcgcctgatccagacgtcggcacccagcggctcatccaccaccactgatagcagcaccaataccgatggccagtcgtgggaggcaacaatggcgaccggcaccaaaaagaccgagcaggtcaccttgatcaacgccgaagtgaactcgcgtgatgccgcccggatcgcccaactgacgtcacagggccgtatcgccgtagtgaaggatccgatccgatgagcaccattgttttgaccagcgtctcgggagccccaggggtcaccacgacagcgatcgggctgggcagggtctggccacaatcgagcctggtcgtcgaggatgacacccaccacgccatgctggcgggctacctgcgagcctcccagcacgccgaaccgaacctggccgcagtggcgaacctgacgtcgactccaaccaacgcccaaacggtgtgggaatctatcgccagacccctacccaccgatgacccagtcggcgggctgcgacgcaaaggcatcctcggcccgcccacgccgtggtctcgcgcaggcatcgacccccgatggggattcatgctggccctgtggcggcaactggaggaggctggcatcgacaccatcatcgatttgggtcgcctagccacaccactgacctcaacgccacacctgatcgccgcacccatcgtcgaggacgccgacatgatcttggtgatgatcgaggcgacactacgcgacatcgccggcgcccgcacgatggtggagggactcgctgagcagatgaacttggccggcgcctaccgacgtctcggactgcttgtccaccgtggcggccaggcccgcggcgtcgccgagttcaatgacaaggagatcacctcggcgttacgactcccggtcatcggggccattacccatgacccggccggagccgcccaactctccgacggggtcgggcagcggttcgacaagtcacgtctggcccactcactatcaaaggtggcggccagcctcgtcgatgccataaacaagcgccacgctgatgacgaggaggatctgtgatggccagttttgctgataatccgttcgacaagctgcgctcccaggatgcggcaagagcttcggtagagcaggagcctgatgccggattagcgtcggagttgttttcgacgtcgtcggggtgggccagctctcagcaggtgtcccaagctcaaccggtgatgacccgttcggagaacgtggattggtcggttgtcgcggagctagccagtacggccactgatgaggttgaggctgagatcagccggtggagttccactcatgatggggtggcgacgctagacattcgccaggccatcgcggagcctgctattgcctcggcggtgtctacgtatgctgaccgacgccagatcgatgtaggggagacctggcctgatctggtacgccagcgataccgcaaggctgtgtgggatcagct

SEQ ID NO: 251 - DNA, 4613 bp, Propionibacterium acnes
gataccgcaaggctgtgtgggatcagctgtgccgctcccccgacatggcagacagcaccgttgcatgagaactgactgacactgtggcgccgcggaggtctcccgcggcgtccgctggggcgagtgcatgcctgtcagctcatcttttatcgtcatgtttccccttgtcagagcggtctttgcaaagtgacaacgtcaggggtcttgacgacaacatcctcgacaacatcgtggcggtggtctgtgtctcgtcagttcaacgcaccggggaaagaggcaccgctgatgttcaccaccacaaacaccctcaacgatgaatgggaccagattcgcgccactgagatcgattggcatgactgccctgaactgatgcactgcatcgacgttgatgatgtgttggccgtcattcctgccgcccccgacgccatcttgggctacctcattgcccgggctcagggcggtgacgagttggccacccgcactatcatccaagcgttcacaggcaagcttattttgatggccacggccaccaaggtgcgccgtactaatgacggcttcaatgatctgttggcgggtctgtgggagacgatcatcacgtacccgttagatcgtcgccctgacaagatcgctgcgaacctcatcctcgacacgttgcaccgggttacccggttttggcgtgctgattcccccgatgaggaagaggctcacggtctggtgcccttccctgacactctcatcgccccagagcccgatgaggacgtcacagctagccaggccatcgccttggcggtggaccgcaactggattaccgaggacctagcccgcctcatgagccatatttactgtgacggtatgactggagctgatgcgggtcgtctgcatggctgcgctccagctacggtgcgatctcgatgccgtgatggtcgggccgtgttgcagcgcaacgccgagacgatcctggccgtctgctgatccctctcttgctcatgcctgccgccaccctacccctacctgctagaaacatagccatgtctccagcaacgcatctagcatatcttctagcaattgatctagctatcatatagctgatgatctagctatcatatagctgtgtctccagcccaaaggacagcccaatggcatgcttgccacaggaaggtgcgtcagcctcccgaaatactggaaggagctttaccgtgcaggacatgacctcgaccagaccgattgaccgatccccgttcgaccgcactattgcggtgtggaaccacaaaggcggcacgttcaagacgtccgtcgtggcgaacctgggatacctgttcgccgccggtggcaacaaggtgttgatggtcgacatggacccccaggccaatctcgacattgacttcggtatacccgcgggagaacgtgaacggggcatgggattagccgaggcgctacgtgaggggacggcccttcccccaccgcagcatctcagcgaaaaccttcacctggtcagtggcggcccggccctccacgagttcaccgaccccgcatccttagcggccatcctcgaccgagtcaccaccgcacgctacgacctgctagctcaggcccttgccccgctggcctgggactatgacctcatcttcatcgactccgggccggcccaaactctgctgtcccagaccatccttggagtagcccgctggctggtagtgcccacccgcaccgataacgcctcaatcactggcctcgtcgacgttcaagacgccatcgacggggttgcctcctgcaaccctgaccttcaactactcggcgttgtcctagccggcgtgggggcccgggccacccggatcgccgcagataaacgccacgccatcgacacagtgctgggggcaggaaccgttttcgatgcggtcatccactactccgagaaggtgtccgtgctcgcacgccagcagggcaagaccgtcgccgagctagccaacgactaccacaacacccagcccgcctacacctacctagctaaaggccagaacatccccaacgtcgccaaggcagccgtcagcatcgaaactgattatctgaggctggccaccgagatcagcgaccgcatgttcaccagcgacgagcaggagcctgatcatgactgacgatccgactccatccgagcagaacaaccccaccagcgacgacatgcgcttggccgaagaatgggccaacagcggccgcacagtgggagccctgccgcgccgtcaacggcctcagcgacccacaccccgcaccaccagccaaccccctgtctcgtcccctgacacaccggctccgaaaaaaccccagaagacccccaccagccagcctggccgtcaacggatcaacgtcaccgtctacgttgtgcccgaactccatgagcggctgcgctcccgatcggcggcgacgggggtgacggtctcggatctggtggtgcatgcgttagcgttcgtcgccgatcatgcgggggaggcgatcgccgatgatctgcgcgtcgagacgggccccggcatgggggccggactgttcgatgtgaccccatcgcggccagtaggggtcgccaaaacccagctgggggtgcgaatgacccgccacaacaaggatggtttggaccagctgacccggacgagtggagcccgtgaccgcagccatcttgtgtctgtcgccgtgcgcgactatctcgactccaaccctgtaaagaaaggccgacatgtccgctgatgaaactcctgccgcccggggtgggcgacgctttgatacgaccgtcaagcccaggcgccgtcccatgcttatcgccgccggtatcgccatcgtgatagtcggcgcgctcctcatcactcagttgattcgctccgcccaaaccgagcatcgcgtgctggaagtccacgccgatgtggctcgcggcgaggtcatccgtgacaccgatctggtatcggtgactgtcggccaggtcgacaacgtatcaacggttcccgcagaccagctcgactcactggtcggcaaacgcgccacggcagatcttcgagccggatcactcttacctgctggggctatcggcccggccgatgtcgttccagctccgggcaagtcgctggtcgggctgaagctagccgccggacagatccctatcggagaccttgctgccgggacgaagctgcgcctgatccagacgtcggcacccagcggctcatccaccaccactgatagcagcaccaataccgatggccagtcgtgggaggcaacaatggcgaccggcaccaaaaagaccgagcaggtcaccttgatcaacgccgaagtgaactcgcgtgatgccgcccggatcgcccaactgacgtcacagggccgtatcgccgtagtgaaggatccgatccgatgagcaccattgttttgaccagcgtctcgggagccccaggggtcaccacgacagcgatcgggctgggcagggtctggccacaatcgagcctggtcgtcgaggatgacacccaccacgccatgctggcgggctacctgcgagcctcccagcacgccgaaccgaacctggccgcagtggcgaacctgacgtcgactccaaccaacgcccaaacggtgtgggaatctatcgccagacccctacccaccgatgacccagtcggcgggctgcgacgcaaaggcatcctcggcccgcccacgccgtggtctcgcgcaggcatcgacccccgatggggattcatgctggccctgtggcggcaactggaggaggctggcatcgacaccatcatcgatttgggtcgcctagccacaccactgacctcaacgccacacctgatcgccgcacccatcgtcgaggacgccgacatgatcttggtgatgatcgaggcgacactacgcgacatcgccggcgcccgcacgatggtggagggactcgctgagcagatgaacttggccggcgcctaccgacgtctcggactgcttgtccaccgtggcggccaggcccgcggcgtcgccgagttcaatgacaaggagatcacctcggcgttacgactcccggtcatcggggccattacccatgacccggccggagccgcccaactctccgacggggtcgggcagcggttcgacaagtcacgtctggcccactcactatcaaaggtggcggccagcctcgtcgatgccataaacaagcgccacgctgatgacgaggaggatctgtgatggccagttttgctgataatccgttcgacaagctgcgctcccaggatgcggcaagagcttcggtagagcaggagcctgatgccggattagcgtcggagttgttttcgacgtcgtcggggtgggccagctctcagcaggtgtcccaagctcaaccggtgatgacccgttcggagaacgtggattggccggttgtcgcggagctagccagtacggccactgatgaggttgaggctgagatcagccggtggagttccactcatgatggggtggcgacgctagacattcgccaggccatcgcggagcctgctattgcctcggcggtgtctacgtatgctgaccgacgccagatcgatgtaggggagacctggcctgatctggtacgccagcgataccgcaaggctgtgtgggatcag

SEQ ID NO: 252 - DNA, 5053 bp, Propionibacterium acnes
tggtgggcgctggaccaggtttgcggggcatgcgcgcatcggtgatcttggccgccaccaggtgttccagattgtccaagtgcccggagtcagaggtcagcagaagagtagtcacctcgaccgcggtggctgaggcgatctgagctgtgcggcggtcgtgatgggtggtgtcagtgctgacagctgtggtgggagcggatgccggggccgccgaacggaccagggcaacggggccgcatgcgactccgcacagcacgagggcaaggaagcctttggtggccatcgatccggtgtggggccagggacccacgttttcctgtgcctgttttttcttggccgaccaacggcgggacttagggttagcggatgcaccttctggggtgcatgctcgtctcaatcgcatcggtcacctccttcactggatgaagggaccaaggaggtgaccgatgtgcggtcgaacccgaaaaagttcaaacttttttctgggtctgcctcaagtacgacagaaggcctgcatcatcacggcgttgtggtagcagatcttgcgtcagcgcaaatgtatgggcctcgtaggagtagctcttaggtgggtcccggtggttgcggccagggcgagggtgtcgggtatgtgtagcgctagtcccgggttcgtggtgtgagggcttttgggtgctgacatgcactacccattgctagacgctgtgctgtggcatggctggacgtctagcagacgggttgacatcacctttaggctggcagcgcccgaggccgcaggccagaggaagcggacagcctaacgattgacgtccccctctcctttccccaacctcctggagtcgatgacccggagatagatcgatgtctatgcatctgtgcatcgatatacctatgtatctgtctgtggtttttagaggccactcccgtcgccccgggccgctcagcgataccgcaaggctgtgtgggatcagctgttccgctctcccgacatggcagacagcaccctgcggactgactgacactgtggcgccgcggaggtctcccgcggcgtccgctggggcgagtgcatgcctgtcagctcatcttttatcgtcatgtttccccttgtcagagcggtctttgcaaagtgacaacgtcaggggtcttgacgacaacatcctcgacaacatcgtggcggtggtctgtgtctcgtcagttcaacgcaccggggaaagaggcaccgctgatgttcaccaccacaaacaccctcaacgatgagtgggaccagattcgcgccactgagatcgattggcatgactgccctgaactgatgcactgcatcgacgttgatgatgtgttggccgtcattcctgccgcccccgacgccatcttgggctacctcattgcccgggctcagggcggtgacgagttggccacccgcactatcatccaagcgttcacaggcaagcttatcttgatggccacggccaccaaggtgcgccgtactaatgacggcttcaatgatctgttggcgggtctgtgggagacgatcatcacgtacccgttggatcgtcgccctgacaagatcgctgcgaacctcatcctcgacacgttgcaccgggttacccggttctggcgtgctgattcccccgatgaggaagaggctcacggtctggtgcccttccctgacactctcatcgccccagagcccgatgaggacgtcacagctagccaggccatcgccttggcggtggaccgcaactggattaccgaggacctagcccgcctcatgagccatatttactgtgacggtatgactggagctgatgcgggtcgtctgcatggctgcgctccagctacggtgcgatctcgatgccgtgatggtcgggccgtgttgcagcgcaacgccgagacgatcctggccgtctgctgatccctctcttgctcatgcctgccgccaccctacccctacctgctagaaacatagccatgtctccagcaacgcatctagcgtatcttctagcaattgatctagctatgtatatagctgatgatctagctaccatatagctgtgtctccagcccaaaggacagcccaatggcatgcttgccacaggaaggtgcgtcagcctcccgaaatactggaaggagctttaccgtgcaggacatgacctcgaccagaccgattgaccgatccccgttcgaccgcactattgcggtgtggaaccacaaaggcggcacgttcaagacgtccgtcgtggcgaacctgggatacctgttcgccgccggtggcaacaaggtgctgctggtcgacatggacccccaggccaatctcgacattgacttcggtatacccgcgggagaacgtgaacggggcatgggattagccgaggcgctacgtgaggggacggcccttcccccaccgcagcatctcagcgaaaaccttcacctggtcagtggcggcgctgctctcaacgagttcaccgaccccgcatccttagcggccatcctcgaccgagtcaccaccgcacgctacgacctgctagctcaggcccttgccccgctggcctgggactatgacctcatcttcatcgactccgggccggcacaaactctgctgtcccagaccatccttggagtagcccgctggctggtagtgcccacccgcaccgataacgcctcaatcactggcctcgtcgacgttcaagacgccatcgacggggttgcctcctgcaaccctgaccttcaactactcggcgttgtcctagccggcgtgggggcccgggccacccggatcgccgcagataaacgccacgccatcgacacagtgctgggggcaggaaccgttttcgatgcggtcatccactactccgagaaggtgtccgtgctcgcacgccagcagggcaagaccgtcgccgagctagccaacgagtaccacaacacccagcccgcctacacctacctagctaaaggccagaacatccccaacgtcgccaaggcagccgtcagcatcgaaactgattatctgaggctggccaccgagatcagcgaccgcatgttcaccagcgacgagcaggagcctgatcatgactgacgatccgactccatccgagcagaacaaccccaccagcgacgacatgcgcttggccgaagaatgggccaacagcggccgcacagtgggagccctgccgcgccgtcaacggcctcagcgacccacaccccgcaccaccagccaaccccctgtctcgtcccctgacacaccggctccgaaaaaaccccagaagacccccaccagccagcctggccgtcaacggatcaacgtcaccgtctacgttgtgcccgaactccatgagcggctgcgctcccgatcggcggcgacgggggtgacggtctcggatctggtggtgcatgcgttagcgttcgtcgccgatcatgcgggggaggcgatcgccgatgatctgcgcgtcgagacgggccccggcatgggggccggactgttcgatgtgaccccatcgcggccagtaggggtcgccaaaacccagctgggggtgcgaatgacccgccacaacaaggatggtttggaccagctgacccggacgagtggagcccgtgaccgcagccatcttgtgtctgtcgccgtgcgcgactatctcgactccaaccctgtaaagaaaggccgacatgtccgctgatgaaactcctgccgcccggggtgggcgacgctttgatacgaccgtcaagcccaggcgccgtcccatgcttatcgccgccggtatcgccatcgtgatagtcggcgcgctcctcatcactcagttgattcgctccgcccaaaccgagcatcgcgtgctggaagtccacgccgatgtggctcgcggcgaggtcatccgtgacaccgatctggtatcggtgactgtcggccaggtcgacaacgtatcaacggttcccgcagaccagctcgactcactggtcggcaaacgcgccacggcagatcttcgagccggatcactcttgcctgctggggctatcggcccggccgatgtcgttccagctccgggcaagtcgctggtcgggctgaagctagccgccggacagatccctatcggagaccttgctgccgggacgaagctgcgcctgatccagacctcggcaggcgggtcatccaccaccgggcagggcgccaccaataccgatattcaatcgtgggctgcgacgatggcgtccggcaccaaaagtactgagcaggtcaccttgatcaatgtggaggtggactcgcgtgatgcagctcggatcgcccagctgacatcgcagggccgtatcgctgtggtaaaggattcgactcgatgagcacaatcgttttgaccagtgtgtcgggagccccgggggtgaccacgacagcgattgggttggggcgggtctggccacagtccagtctggttgtcgaggacgacacccatcacgcgatgttggcgggctatctgcgagctgcccagcacgccgagccgaacttggccacggtggcaaatctgacggccactccgaccaatgcccaaaccgtgtgggaatccatcgccaggcctctgcccaccgatgatccggtcagcgggctgagacgcaaggccgtcctcggcccgcccacaccgtggtctcgtgcaggtatcgacccccggtggggattcatgctggccctgtggcggcagctggccgaggccgggatcgacaccatcatcgacctgggtcgcctagccacgccgctgacgtcaacgccacatctgatcgccacacccatcgtcgaggacgccgacatgatcctggtgatgatcgaggcgacgctacgcgatgtggccggcgcccacacgatggtcgaagggctggccgagcagatgaacctggccggggcccaccagcgcctcggactgttggtccaccgcggcggcgcggcccgcggggtcgctgagttcaccgacaaagagatcacgtcggcgttgcagctaccggtctgcgggtcgatagtccatgacccagtcgcggcagcccagctgtctgacggggtcgggcagcggttcgacaagtcgcgtct

SEQ ID NO: 253 - DNA, 4892 bp, Propionibacterium acnes
gataccgcaaggctgtgtgggatcagctgttcgggatggggcggttgcagccgctgttcgaaatcagcgacgccgaaaacatcatcgtggtgggtaaccatgaggtggttgtcgaccacaacgatggttcccggtcaacgctgccgccggtggccgactcggatgccgagctggaatcccagatcgcccggatggcgaggaatgcgaccccgcggcgagccttcgacaccgatcacaccgatgtgacgatcatgcaccaacagaagttccgtatccacgcgatctcagcggaagtgtcattgcaaccgtcggtggtcatccgccaacatttgctcacccaaatcagtctgggggacctgtcacatcgcggaatgatgccggtggaagtggcccggttcctcgatgaggcggtacaagctggcaagtccatcgtggtcgccggcgagcagggggcaggcaagacgacgtttttacgagcgttgatccacgccattccgatgcgggagcggttcgccacgttggagaccgatcaggagttgttcgctcatctgatgcctggccgggaaaacacgctggtgctgttcgcccgtgatggtaacggcgaggtggatccggcgactggcacccagcacggcgctatcgagatcgcccagctgattcctcctagcctgcgccaggcgttaactagggtcattgtcggtgaggtgcgcggcaatgaggcctcggccatgttccaggccatgcagtcgggtacaggcaccatgagcagtatccactccccgcgagcctctgaggtgccgtcccggctagcccaaatgatttcgatgggcccggtctacgatctggatcaggccatgctgcagatcggtcattcgatcgactacatcgtctttgttcgtaagcgtgacctgcctgatgggagccggctgcgatttgttgagcagatccgttcagtctcgcctggtgattcgacaactcccagtcttggcgaggtgtacacggctgactcgtggacaggccagccgcttacgccactcatgcctggttcggccgccgacgagctgtctcacttcgcccgagacctggattactgcgaggcccactcatgaacactcccgcactaaccagcgccctcatcgtgaccgggctagggctgatcctggccatcgacgggctggtcccggcgccgcctcgacctggtgccccgctgagcccggcccaaaggtgggctcggctcacccaccgtcccactggtgcggccgggcgtcgccgggatttgcgttgggggttggctgttcttgtcggtgtcgtgctgtttgtgctcaccgggtgggtggctgcgctggcgctgggccccatcattgtgttgttggcccccaccctgctgggggcggccccaccgaccgatattccgctgatggaggcgctggatcggtgggtgcgtcaggtcgctgcggtactgccacaggggcgagacatcatcacagcggtgcggatctcacggccgcgggccccgaagctgatcgccgggtcggtggatcaactggtgtcccggttggatggccgtatggagccgagggaggcgttccagcggatggccgacgagctggactcggctgaggctgacgcggtgctggcctcactagcgttggcggccactcatccgcggggagcctcgacaacgttgaaggctattgctggcaacatccaacagcggttgaaagtgctgcggcaggtggaggctgaacggtctaagccgcgtaactcggtgcgccagatcacactggtcacgatcgccatgttcggggggctgctcgtgatcggacggtcgtttctggccccgctggcgacccctcccggtcaggtgctggtggccgtggcggtggtcatgtatgtcatcgcactagtgcagatgtatcggatggcgcggccccgtcgacgcacccggatcatggtcaggaggacccgatgaccattactgctttgtccctgctagccggggccatcgtcactgtcggactgctggtcatcgtggcagcgttccgcccagccccaggccctgacctggttgccgctctggaggtggtgtcgggtcgcacctcaagcgtcgccgagaacgtcgaccagacccggatcgggcggataggtcgcagcgtgacccgcacattccatgtgtcggtgtccccggccatgcgggccgcactgcgactccaaggcacgacccccgaagcgttctacggtcgacgcctgatctgcgcactgatcggggcgatcctgccgtggctgctcaacgcggtagccatcgcggtaggggcgaattccccgaacctactcatcccttcggcgctgtgtgtggcgttagctggcgctggatggatgctgccggcagcacggttgaaggctgcggccgggcccaccaacgatgactcgttcgaagcgctgctggtattcatcgatttggtcgtgctggaacggctcgccaacgaaacctccgtcgacgcgctcaccaatgcggcaaacatgtcggactcgccgctattcgtccagatccgtcaagtcctcaaccgtgcctccctggaaaacgtcgacccgtggaacgggctagaccggctagccgaggacatcaaactgcccgaactcaccgatgtggtctccatcgcccgcctccaaaacgaaggcgcctccctcgtcgacagtttccgggcccgagtcgccgagttacgcgacgcctacctgctgcgcctgcaacaagaatccaccgccatcacccagcggcttggtttgtggacgatcctgcaagccggctcggtcatgctcatcttgctgggggcggccgccctcacactcatcacagccggataaaccgacaccgtgtcgagcccccatatgggccgcgaacctttcataatgatgcctgtaagcaccacaatattgatcacaacctaacaatgaaggagaaatcatgatgaccgatctcgacctggctaaaaaacagatcacctggctggcggcgcacctgcgttcccggatcgttgacgagcgtggcggtggtagctctaccgtggagacactgatttggattggtgtcatcgtggcgctggtgattggtgtgggcgtcggggtgacggcctatatcaggtcgaagatgcctcactgacgacgatgcgtagcaggttcacaactgatcagcgtggcggtggtagcgcgtcggtggggatgctcctgctgatgcctgcgatcatgctgctggcattcggtgggatcgaggtcgggatgtggtgtcacgcccatcagtcgaccatcgcggcagcccaaagcgccgcggaagctcagcgtgtcgtccatccggtcccggggtcggcacaggaggcagcctcgcagatcactagtcatggcggggtgcgtgatacccggatatcggtcagtgatgacggggccactgtcacggtgaccgtctcaggtcgggccccatcgatgctggggctgcatcttccggctgtgtcgtcgacagcgtcgatgcccaaggagcgcctgtcgtgaggcgaagtgagcgcggcggagcaagtctaagcgtcgaggtgctcatgtgggcgccgatcgcgctggtgatcatcgggtttgttgtgggtatcggccggatgtcgatggcccaggacgcggtgagtggcgcggctggtgctgcggcccgtgcggcgtcgttggagcgtgatggacagtcggctcagtctgcggcgcagcaggcggcgtcggcgaacctgtcgtccggtgggctggcatgtgcgccgagtgtgagcgtggacacgtcagtgtttgcccgtcctgccgggcaggcgggcacggttcacgccacggtcacgtgtgtcacctcgctgggtcttggattcgggtcccggacggtgcacgcaacggggtctgccccggtagacacctatcgggaaaggagaggctgagatggcccgcgatgagcgtggtggcggctcggtgtcggtgtggatgctgctcatggtgccggtgattctggtcatggccggcctggtttttgacgggtcccgtcagatatcggcaacccaggcggcccaggacgcggcggttgcggcatcccgcgccggaactgatgcggcagcgacaccgcagcttgctggccacgacggggcggccgtagcagtccaagcggcccgccaggcactatctgctgccggggtggacgggtcggtgcaggaggacgggtcgaccatcacggtgaccacgtctcaaagtcggccgacagtgttcctgtcagcgatcggaatcagccaggtaagggggcatgggcaggcccatgctcagcttgtgggaccgggagaacgcccatgacagtgatacgtcgtatcggtgccctggtggcactgctggtggtgatagccggcttaccggccgggctcgtggccgcaggcgccccgctagtaccctcgggcctgtcatgggcccatgtgcggcatctgttggttaccccagacatgaccgggtcggtgctggtgtggctggtcagcctcatcggctggatcgggtgggcatggttcgccctggccgtcgcagccgaagcggtgacgatgctctcagggcagcggctgcactggcacatgcccggcccccgcttggcgcgccgagtggcagccggtctcctcattgccgcgttcgcgggcgcaccggcggccacgtcggcagctcacgcggtcgaggccacccatgtggcggtcgcagctcaggcttccccggcccacgcggccggcacccaggacagccccgccaccacctctcaggccccggacgcctccaccactccgaaaatctggaagacctacacggtgcgggccaacgactacctgtggaagatcgccgagcactactacggt

SEQ ID NO: 254 - DNA, 4611 bp, Propionibacterium acnes
gcgataccgcaaggctgtgtgggatcagctgtgccgctcccccggcatgacaggcggcgccccacagattgacgacactgcggggctgcggaggtctcccgcggcgtccgctggggcgagtgcatgcctgtcagctcatcttttatcgtcatgtttccccttgtcagagcggtttttgcaaagtgacaacgtcaggggtcttgacgacaacatcctcgacaacatcgtggcggtggtctgtgtcttgtcagttcaacgcaccggggaaagaggcaccgctgatgttcaccaccacagctaccctcaacgatgaatgggaccagattcgcgccatcgagatcgattggcatgactgccccgaactgatgcactgcatcgacgttgatgatgtgttggccgtcattcctgccgcccccgacgccatcttgggctacctcattgcccgggctcagggcggtgacgagttggccacccgcactatcatccaagcgttcacaggcaagcttattttgatggccacggccaccaaggtgcgccgtactaatgacggcttcaatgatctgttggcggggttgtgggagacgatcatcacgtacccgttggatcgtcgccctgacaagatcgctgcgaacctcaccctcgacacgttgcaccgggttacccggttctggcgtgctgattcccccgatgaggaagaggctcacggtctggtgcccttccctgacactctcatcgccccagagcccgatgaggacgtcacagctagccaggccatcgccttggcggtggaccgcaactggattaccgaggacctagcccgcctcatgagccatatttactgtgacggtatgactggagctgatgcgggtcgtctgcatggctgcgctccagctacggtgcgatctcgatgccgtgatggtcgggccgtgttgcagcgcaacgccgagacgatcctggccgtctgctgatcctctcttgctcatgcctgccgccaccctacccctacctgctagaaacatagccatgtctccagcaacgcatctagcatatcttctagcaattgatctagctatgtatatagctgatgatctagctatcatatagctgtgtctccagcgcaaatgacagcccaatagcatgcttgccacaggaaggtgcgtcagcctcccgaaatactggaaggagctttaccgtgcaggacatgacctcgaccagaccgattgaccgatccccgttcgaccgcactattgcggtgtggaaccacaagggcggcacgttcaagacgtccgtcgtggcgaacctgggatacctgttcgccgccggtggcaacaaggtgctgctggtcgacatggacccccaagccaatctcgacattgacttcggtatacccgcgggagaacgtgaacggggcatgggattagccgaggcgctacgtgaggggacggcccttcccccaccgcagcatctcagcgagaaccttcacctggtcagtggcggcgctgctctcaacgagttcaccgaccccgcatccttagcggccatcctcgagcgggtcaccaccgagcgctacgacctgctagctcaggcccttgccccgctggcctgggactatgacctcatcttcatcgactccgggcctgcccaaactctgctgtcccagaccatccttggagtagcccgctggctggtagtgcccacccgcaccgataacgcctcaatcactggcctcgtcgacgttcaagacgccatcgacggggttgcctcctgtaaccctgaccttcaactactcggcgttgtcctagccggcgtgggggcccgggccacccggatcgccgcagataaacgccacgccatcgacacagtgctgggggcaggaaccgttttcgatgcggtcatccactactccgagaaggtgtccgtgctcgcacgccagcagggcaagaccgtcgccgagctagccaacgagtaccacaacacccagcccgcctacacctacctagctaaaggccagaacatccccaacgtcgccaaggcagccgtcagcatcgaaactgattatctgaggctggccaccgagatcagcgaccgcatgttcaccagcgacgagcaggagcctgatcatgactgacgatccgactccatccgagcagaacaaccccaccagcgacgacatgcgcttggccgaagaatgggccaacagcggccgcacagtgggagccctgccgcgccgtcaacggcctcagcgacccacaccccgcaccaccagccaaccccctgtctcgtcccctgacacaccggctccgaaaaaagcccagaagacccccaccagccagcctggccgtcaacggatcaacgtcaccgtctacgttgtgcccgaactccatgagcggctgcgctcccgatcggcggcgacgggagtgacggtctcggatctggtggtgcatgcgttagcgttcgtcgccgatcatgcgggggaggcgatcgccgatgatctgcgcgtcgagacgggccccggcatgggggccggactgttcgatgtgaccccatcgcggccagtaggggtcgccaaaacccagctgggggtgcgaatgacccgccacaacaaggatggtttggaccagctgacccggacgagtggagcccgtgaccgcagccatcttgtgtctgtcgccgtgcgcgactatctcgactccaaccctgtaaagaaaggccgacatgtccgctgatgaaactcctgccgcccggggtgggcgacgctttgatacgaccgtcaagcccaggcgccgtcccatgcttatcgccgccggtatcgccatcgtgatagtcggcgcgctcctcatcactcagttgattcgctccgcccaaaccgagcatcgcgtgctggaagtccacgccgatgtggctcgcggcgaggtcatccgtgacaccgatctggtatcggtgactgtcggccaggtcgacaacgtatcaacggttcccgcagaccagctcgactcactggtcggcaaacgcgccacggcagatcttcgagccggatcactcttgcctgctggggctatcggcccggccgatgtcgttccagctccgggcaagtcgctggtcgggctgaagctagccgccggacagatccctatcggagaccttgctgccgggacgaagctgcgcctgatccagacgtcggcacccagcggctcatccaccaccactgatagcagcaccaataccgatggccagtcgtgggaggcaacaatggcgaccggcaccaaaaagaccgagcaggtcaccttgatcaacgccgaagtgaactcgcgtgatgccgcccggatcgcccaactgacgtcacagggccgtatcgccgtagtgaaggatccgatccgatgagcaccattgttttgaccagcgtctcgggagccccaggggtcaccacgacagcgatcgggctgggcagggtctggccacaatcgagcctggtcgtcgaggatgacacccaccacgccatgctggcgggctacctgcgagcctcccagcacgccgaaccgaacctggccgcagtggcgaacctgacgtcgactccaaccaacgcccaaacggtgtgggaatctatcgccagacccctacccaccgatgacccagtcggcgggctgcgacgcaaaggcatcctcggcccgcccacgccgtggtctcgcgcaggcatcgacccccgatggggattcatgctggccctgtggcggcaactggaggaggctggcatcgacaccatcatcgatttgggtcgcctagccacaccactgacctcaacgccacacctgatcgccgcacccatcgtcgaggacgccgacatgatcttggtgatgatcgaggcgacactacgcgacatcgccggcgcccgcacgatggtggagggactcgctgagcagatgaacttggccggcgcccaccgacgtctcggactgcttgtccaccgtggcggccaggcccgcggcgtcgccgagttcaatgacaaggagatcacctcggcgttacgactcccggtcatcggggccattacccatgacccggccggagccgcccaactctccgacggggtcgggcagcggttcgacaagtcacgtctggcccactcactatcaaaggtggcggccagcctcgtcgatgccataaacaagcgccacgctgatgacgaggaggatctgtgacggccagttttgctgataatccgttcgacaagctgcgctcccaggatgcggcaagagcttcggtagagcaggagcctgatgccggattagcgtcggagttgttttcggcgtcgtcggggtgggccagctctcagcaggtgtcccaagctcaaccggtgatgacccgttcggagaacgtggattggccggttgtcgcggagctagccagtacggccactgatgaggttgaggctgagatcagccggtggagttccactcatgatggggtggcgacgctagacattcgccaggccatcgcggagcctgctattgcctcggcggtgtctacgtatgctgaccgacgccagatcgatgtaggggagacctggcctgatctggtacgccagcgataccgcaaggctgtgtgggatcagct

SEQ ID NO: 255 - DNA, 4345 bp, Propionibacterium acnes
ccggacagatccctatcggagaccttgctgtcgggacgaagctgcgcctgatccagacgtcggcacccagcggctcatccaccaccactgatagcagcaccaataccgatggccagtcgtgggaggcaacaatggcgaccggcaccaaaaagaccgagcaggtcaccttgatcaacgccgaagtgaactcgcgtgatgccgcccggatcgcccaactgacgtcacagggccgtatcgccgtagtgaaggatccgatccgatgagcaccattgttttgaccagcgtctcgggagccccaggggtcaccacgacagcgatcgggctgggcagggtctggccacaatcgagcctggtcgtcgaggatgacacccaccacgccatgctggcgggctacctgcgagcctcccagcacgccgaaccgaacctggccgcagtggcgaacctgacgtcgactccaaccaacgcccaaacggtgtgggaatctatcgccagacccctacccaccgatgacccagtcggcgggctgcgacgcaaaggcatcctcggcccgcccacgccgtggtctcgcgcaggcatcgacccccgatggggattcatgctggccctgtggcggcaactggaggaggctggcatcgacaccatcatcgatttgggtcgcctagccacaccactgacctcaacgccacacctgatcgccgcacccatcgtcgaggacgccgacatgatcttggtgatgatcgaggcgacactacgcgacatcgccggcgcccgcacgatggtggagggactcgctgagcagatgaacttggccggcgcctaccgacgtctcggactgcttgtccaccgtggcggccaggcccgcggcgtcgccgagttcaatgacaaggagatcacctcggcgttacgactcccggtcatcggggccattacccacgacccggccggagccgcccaactctccgacggggtcgggcagcggttcgacaagtcacgtctggcccactcactatcaaaggtggcggccagcctcgtcgatgccataaacaagcgccacgctgatgacgaggaggatctgtgatggccagttttgctgataatccgttcgacaagctgcgctcccaggatgcggcaagagcttcggtagagcaggagcctgatgccggattagcgtcggagttgttttcgacgtcgtcggggtgggccagctctcagcaggtgtcccaagctcaaccggtgatgacccgttcggagaacgtggattggccggttgtcgcggagctagccagtacggccactgatgaggttgaggctgagatcagcaggtggagttccactcatgatggggtggcgacgctagacattcgccaggccatcgcggagcctgctattgcctcggcggtgtctacgtatgctgaccgacgccagatcgatgtaggggagacctggcctgatctggtacgccagcgataccgcaaggctgtgtgggatcagctgttcgggatggggcggttgcagccgctgttcgaaatcagcgacgccgaaaacatcatcgtggtgggtaaccatgaggtggttgtcgaccacaacgatggttcccggtcaacgctgccgccggtggccgactcggatgccgagctggaatcccagatcgcccggatggcgaggaatgcgaccccgcggcgagccttcgacgccgatcacaccgatgtgacgatcatgcaccaacagaagttccgtatccacgcgatctcttcggaggtgtcgttgcaaccgtcggtggtcatccgccaacatttgctcacccaaatcagtctgggggacctgtcccagcggggaatgatgccggtggaagtggcccggttcctcgatgaggcggtacaagctggcaagtccatcgtggtcgccggcgagcagggggcaggcaagacgacgtttttacgagcgttgatccacgccattccgatgcgggagcggttcgccacgttggagaccgatcaggagttgttcgctcatctgatgcctggccgggaaaacacgctggtgctgttcgcccgtgatggtaacggcgaggtggatccggcgactggcacccagcacggcgctatcgagatcgcccagctgattcctcctagcctgcgccaggcgttaactagggtcattgtcggtgaggtgcgcggcaatgaggcttcggccatgttccaggctatgcagtcggggactggcactatgagcagtatccactccccgcgagcctctgaggtgccgtcccggctagcccaaatgatttcgatgggcccggtctacgatctggatcaggccatgctgcagatcggtcattcgatcgactacatcgtctttgttcgtaagcgtgacctgcctgatgggagccggctgcgatttgttgagcagatccgttcagtctcgcctggtgattcgacaactcccagtcttggcgaggtgtacacggctgactcgtggacaggccagccgcttacgccactcatgcctggttcggccgccgacgagctgtctcacttcgcccgagacctggattactgcgaggcccactgatgaacaccccagcgctgatagcagccctcatcgtgaccggcctgggactgatcatggccatcaacggcctgatcccggccacacccaaacccggcaccacgctgacgctgtcacagcggtgggcccgggccacccaccgcccagccggggcagccgggcgccgacgcgacctgcgctgggcgctggccggtctcgtcggcatcgtgctgttcgtcctcacaggttgggtcgctgccctggccctgggccccatcaccgtgctgctagcacccaccctgctgggggcggccccaccgaccgatattccgctgatggaggcgttggatcggtgggtgcgtcaggtcgctgcggtgctgccacaggggcgagacatcatcacagcggtgcggatctcacggccgcgggccccgaagctgatcgccgggtcggtggatcaactggtgtcccggttggatggccgtatggagccgagggaggcgttccagcggatggccgacgagctggactcggctgaggctgacgcggtgctggcctcactagcgttggcggccactcatccgcggggagcctcgacaacgttgaaggctattgctggcaacatccaacagcggttgaaagtgctgcggcaggtggaggctgagcggtctaagccgcgtaactcggtgcgccagatcacactggtcacgatcgccatgttcggggggctgctcgtgatcggacggtcgtttctggccccgctggcgacccctcccggtcaggtgctggtggccgtggcggtggtcatgtatgtcatcgcactagtgcagatgtatcggatggcgcggccccgtcgacgcacccggatcatggtcaggaggacccgatgaccattactgctttgtccctgctggccggggccatcgtcactgtcggactgctggtcatcgtggcagcgttccgcccagccccaggccctgacctggttgccgctctggaggtggtgtcgggtcgcacctcaagcgtcgccgagaacgtcgaccagacccggatcgggcggataggtcgcagcgtgacccgcacattccatgtgtcggtgtccccggccatgcgggccgcactgcgactccaaggcacgacccccgaagcgttctacggtcgacgcctgatctgcgcactgatcggggcgatcctgccgtggctgctcaacgcggtagccatcgcggtaggggcgaattccccgaacctactcatcccttcggcgctgtgtgtggcgttagctggcgctggatggatgctgccggcagcacggttgaaggctgcggccgggcccaccaacgatgactcgttcgaagcgctgctggtattcatcgatttggtcgtgctggaacggctcgccaacgaaacctccgtcgacgcgctcaccaatgcggcaaacatgtcggactcgccgctattcgtccagatccgtcaagtcctcaaccgtgcctccctggaaaacgtcgacccgtggaacgggctagaccggctagccgaggacatcaaactgcccgaactcaccgatgtggtctccatcgcccgcctccaaaacgaaggcgcctccctcgtcgacagtttccgggcccgagtcgccgagttgcgcgacgcctacctgctgcgcctgcaacaagaatccaccgccatcacccagcggcttggtttgtggacgatcctgcaagccggctcggtcatgctcatcttgctgggggcggccgccctcacactcatcacagccggataaaccgacatcgtgtcgagc

SEQ ID NO: 256 - DNA, 4249 bp, Propionibacterium acnes
gacgccggccaccccaactactccgacccacacggtgaccccagctccggcctctgccggccactcgaccagcgacgagcacccactccatacggataccgccgcagcggacaaggccagcaacgaggacgccctgtccccaatccaggtgggtttgaccgccagcgtcggactggtgctggtcgccggactgatcaccaccctcaaccgccgctaccggacccggttcacccgccagccccgcggcaaggccatgaccctgcccagcccggacgcccaaactgccgagatagcgctgcgcagcaccggggcgactgacactctgacgatcacctgcctcgaccaggcgctccgcgcgatcggcgcatggtgccaccactgcgggcacccgctgccacccctgctggccgcccgcgtcgatgacgaccggatcgacctgctgctatcccaggcggcccccgaccatcccgaggcggtggagctggccgccgacggatcggtgtggaccctcaccgccgaccggatcgacgacctgctagcccacaccgatgacaaccaagcggctccgtggccgtctctggtcacactgggacgcgacgacgacggcgcccacatcctcatcgacttggaagccgcaggaaccttgcacctgatcgccgatgacgaccaggtcgacgcggccctcgccgcgatcgccgtggaactggccacctgcgactggtccgacgaagtcaacgtcaccctcgtcggccaggtgtgcccgggcctagaagacgcactagagtctccgaccctgacccgcgccaccgacgtggacaccctcctcaccaccctagaagctcgcgccgacgaccagcgacacatcctcaccgaaggaaaccccctcgccgctcaccgagccgaccccgccatctccgacgggttcgacgccgaagtgatcctcctcgacaccgaactcaccgaagaccaccgcaaccgcctcgccagcctcgtcgaggctcttccccgcgtgtcagtcgccgcggtaacaaccagccccaccagctcagacgaatggtccctcaccctgacaggtgacccactagccgccgacctggctcccctcggctggcacatccacccccaaaccctctcccccgacctgtacaaccgcatggttgaactactcgccaactccgccgccgcagactacgaacccgccagctggtggaaccacgacgccgacgacgagcccaccaccgaccccaccaacgaggaagaatctaccccgagcaggcgagcccgcccgaatatccgcctgaccaccctgaccggcggcatcgacctatccagcgtcgacatcgacgacatcatcgacgaagccaaccaggccctcgacaacaccgaccagaccaccaaccaggttcgcgtcgacaccaaccaacccggcaccgacacccccttccccatcgacgacatcgacccgctgagctccgaccatccggtcctatccatcatcggccaccccgacatcacaggtgccactggaaccgttgggcgctccccgtggcgctgccaacagttggctctctacatcgctgagcatccgggagcatcgggggcgactatcgccgatgatttggggctatcagcgtcgacggtgcgctcgattgctacacacctgcgacactggttgggagccgacgatgccggggtggcttacatgccggcggcgacgcgcggctaccggctcgatgagcggatcgtcacagatgtggacctgatcgacgctgctgtggccggggcaggcattaacaccgctgagacggccacactggtggccattttgaagctgggccgcggacgggtcttcgctggggttcctgactcggaacttcgccagttcagggcgtcgatgtaccacgtggaggcccgcatcgtcgatgctgccctccaagtgacagaccgggccctggaagccggggacctggggctggcccggtgggcgttgacccaagggctactggtgtctcccgatcatgaggacctggtcaccggttgtctgcgcaccgagtaccaggccggcaacatggacaaggtttccgagctggtcgatcacctgtcggctaccgcacgacgcctgggcgtcgatttgagcgccgacaccacccggatcatcgactccgttattacccatacacgcaggagagcatcatgatctcccgttgcactcatctccgtcaggaaggttcctatgcaccattatcgtcttggtatcggcactgccctcatcgcggtagcagccgtggccggctgtcgctcaacagactcgacacccacaccacctccatcccgtgtctccgccacgacatcagcgagctctaccctcagcccgaccccgtcagccggagcgatcagtgccgccgacgccgaaaacatctaccgcaccgtccaagctaacaagatcgcactgtacaaaaagggtggcctggcacccggggaacccgcacccgcgacactgtcgaactacgccaccggccaggctctcaccgactacatgacctacatgcaccaaatctcggggcagggcatcaaaatcacatcggggaactcctcggttaccgcggtgcgggagaaaaagggtgataccacctaccccgaagccgctatcgccttggaatcgtgcgaagacgacagttcgattcgtaccgtggaccgccacggaaaggctgatcatggacgcattttccatgtcgacagttggtatgcccgcgataagaagggcaccgtcaagatgatcgcattcaactcaacggaggtccccacatgcgacgtcaagtaatcaccgcggccgtactgggcctggccctggccaccacctccctgcccgccctcgcaggcggcggcgacttgaacggcagtgtggacacggatggccctggttacgatgtgcgtactgaggtggattaccatcacaccaccggtggtgcgggtgggggtgccacgacagggggccatcatgggggcaaaacccacggtgatggtgaaggtgaggctattgatgggcgttctcgcgccgatgccgaagccgaactagacgaagccgaccgtaaccaggacttgacttgtgatgtcttgctcccaccggcgccgaataccccagccggccaggaatgggcgaaagaatgcaatcccccagcgaaaaaggggcagaaggccaccccgaagcccgatccggtgttagtgggccgtcacgcggccttgcagctcacccttcccggcgcggcccctcgtatcgatccgtcccccgaccttaaccggtggcactcggcagcagtgggccaggctttgtggttgtcggttgatgaccccaccgccactacgcagaaatcgatcacgtttatgggccaggttgtctcgttgagcgccaaacgtaacggtttgtcgtttgatatgggtgatggtcatgtcgtgcactgtgatgccacgacgacatggacggagtcggtggaaccggggaccccctcacccacgtgcggttacacctaccaacaggcagccccggccgggggctataaggtcaccgcaatcacgtcgtgggatgtgacctggtcggtactaggacacacgggcacagtccacatccagaaggccggtgggcagatgcttccggtcggcgagttggagtctgttgttacacggcgatgactcctgatagtccgacgctgtatgaggtgttggaggtctgccctgatgccactgatgaccagatcaagacggcgtggcgtcgtgccgcgaaagtgactcaccctgatgccggtggcactagtgaggcgttcgcggccgcccggcacgcctgggaggtgttgtctgatcctgcccggcgcaccgcctacgatgccgacctggcgggggaggatgatcccgacgacgaagccgccgacgccttcgacgttgatccgttcacggcatggccctggtgcgccccgtacatcgacgccacccccaccctgcgccacacctgccccggcacgatcaaggccatcgtggtcgccatcgccgggatcatggccggaatcggctggcaggaagcgctggaggccgtggtgtcgccgccggggtttctgggggcgtgctggatagtctcagtgccggttgtcgtcgcagtgacatggctggcagcggtgacgggtctggcatttttcaccatggcggccatctggtgtggatggtcgttgataggtggtgcgttgctgtggggccagacgtc

SEQ ID NO: 257 - DNA, 1918 bp, Propionibacterium acnes
aaccgtcatctggcgtggagtagcgagctgatgcaggaaggcaatttgtacggccttcccgaggaagacccgttgtggggcgaggccgtggagctggtagcgggacttatcccctctgtgcgggcgatgtggtcgcacgatgggcagaccgtgactgtgtcggctggccggcgggtggcgacactggggatgccgatgcggggatggcgtggtatcgagatgcgcggctggaatccagtgggcgccgatacgtggtggatcgttgaccaggtgggtagttggctggtcgatcaggatgagccgatggtcgttgacgggagggtgctccatgaggcgtgggaacggtcgcagatggtccgttcaggccgctgagaaaaaatttaggtccgccctgcatatcggggcctcttcataccttcaaaagtgtgaagggaatacagactcttcgactggaattaaaatggtatatggcgtgtccggtccgcacccagctccacgatgcgccataggggagccataacttcaccaatcgtatacgatatgagtgtaggtgagcatctaccggtggccgacagtcagatacaagcatgggcggatgaagcagaagctgattatgacctcagcatgcttccgccgtctcgacgtggtcgcccaccggtggggaggggcccgggcactgtggtccctgtgcgcttcgacgcggacactctcaaggcgttgtcacaacgagcccctgacgaaggattgaccacgcgttctgacgcgatccgtgctgcggttaaccagtggctcggcctcggctcgtaaacattatcggcgcgacaaccttactgatgacgctgttggttacgccgtagagcacatcttgtactcgtgggcgctcgacgatgctgatgatcctcgttgctggatgatgattcggtgttgacccagctggcctcctcatggagctagttatcctcatctacgacgatggctatgaactcctgatccacgccatgaaagcccgccctcagtatctgagctacttcgctatctagtgttgttgggcgagttgaactcaacttttctccgacgcaagcgccaataaaaggctgatccatccgaataccaccaaacacggctgacgtgtggaacagattcagcaagacagggtgcggtgctcgggtgcgttggggagatgaggatattcaggcttctggcgggatgtggcttgatgacgtccaggatcaccggttcggttttgaaggtgccttgcattaatgtcgacagggtcgtacgactcgaggactggatcgaccagcccgttgcgtctgaagaacttcatccaccccggtggagctccggccgcgtactggtgcaacggatcattagcatgggtagcgtgagtatgccttcgatcgtggtcagtgctgtcatcatccaaggttctgacgggcggcttctcactgtccgtaaacgaggcaccgaggcattcatgctgccaggcggcaagccggagcccggcgaggactcgcgtcaggcagtagtccgggaagtgcacgaagagctcggcgtcgcattgtcttccgacgacctgcgtcgggtgggagtgttcaccacgcgagcagcgaatgaggccggccatcaggtggtggcgacgattttcacccacaccccggttgcggtgagtgagccagctgctgagatcgagcagattcgttggctcgattggagtgtcgacgccctgcctgatgacctggccccgctgctggtcgaggcagtcatcccgtggctgcggcgccgtatccggtcggtcgctgtattcacgggtgcgaaggatggaaccgaccctcattatcgtgtcgaagcaaccgccttgggccggggtctcgcacacgccgggatcaccctggtttatggcggcgggaaggtcggg

SEQ ID NO: 258 - DNA, 4029 bp, Propionibacterium acnes
gacgatcatcacgtacccgttagatcgtcgccctgacaagatcgctgcgaacctcatcctcgacacgttgcaccgggttacccggttttggcgtgctgattcccccgatgaggaagaggctcacggtctggtgcccttccctgacactctcatcgccccagagcccgatgaggacgtcacagctagccaggccatcgccttggcggtggaccgcaactggattaccgaggacctagcccgcctcatgagccatatttactgtgacggtatgactggagctgatgcgggtcgtctgcatggctgcgctccagctacggtgcgatctcgatgccgtgatggtcgggccgtgttgcagcgcaacgccgagacgatcctggccgtctgctgatccctctcttgctcatgcctgccgccaccctacccctacctgctagaaacatagccatgtctccagcaacgcatctagcgtatcttctagcaattgatctagctatcatatagctgatgatctagctatcatatagctgtgtctccagcccaaaggacagcccaatggcatgcttgccacaggaaggtgcgtcagcctcccgaaatactggaaggagctttaccgtgcaggacatgacctcgaccagaccgattgaccgatccccgttcgaccgcactattgcggtgtggaaccacaaaggcggcacgttcaagacgtccgtcgtggcgaacctgggatacctgttcgccgccggtggcaacaaggtgttgatggtcgacatggacccccaggccaatctcgacattgacttcggtatacccgcgggagaacgtgaacggggcatgggattagccgaggcgctacgtgaggggacggcccttcccccaccgcagcatctcagcgaaaaccttcacctggtcagtggcggcccggccctccacgagttcaccgaccccgcatccttagcggccatcctcgaccgagtcaccaccgcacgctacgacctgctagctcaggcccttgccccgctggcctgggactatgacctcatcttcatcgactccgggccggcccaaactctgctgtcccagaccatccttggagtagcccgctggctggtagtgcccacccgcaccgataacgcctcaatcactggcctcgtcgacgttcaagacgccatcgacggggttgcctcctgcaaccctgaccttcaactactcggcgttgtcctagccggcgtgggggcccgggccacccggatcgccgcagataaacgccacgccatcgacacagtgctgggggcaggaaccgttttcgatgcggtcatccactactccgagaaggtgtccgtgctcgcacgccagcagggcaagaccgtcgccgagctagccaacgactaccacaacacccagcccgcctacacctacctagctaaaggccagaacatccccaacgtcgccaaggcagccgtcagcatcgaaactgattatctgaggctggccaccgagatcagcgaccgcatgttcaccagcgacgagcaggagcctgatcatgactgacgatccgactccatccgagcagaacaaccccaccagcgacgacatgcgcttggccgaagaatgggccaacagcggccgcacagtgggagccctgccgcgccgtcaacggcctcagcgacccacaccccgcaccaccagccaaccccctgtctcgtcccctgacacaccggctccgaaaaaaccccagaagacccccaccagccagcctggccgtcaacggatcaacgtcaccgtctacgttgtgcccgaactccatgagcggctgcgctcccgatcggcggcgacgggggtgacggtctcggatctggtggtgcatgcgttagcgttcgtcgccgatcatgcgggggaggcgatcgccgatgatctgcgcgtcgagacgggccccggcatgggggccggactgttcgatgtgaccccatcgcggccagtaggggtcgccaaaacccagctgggggtgcgaatgacccgccacaacaaggatggtttggaccagctgacccggacgagtggagcccgtgaccgcagccatcttgtgtctgtcgccgtgcgcgactatctcgactccaaccctgtaaagaaaggccgacatgtccgctgatgaaactcctgccgcccggggtgggcgacgctttgatacgaccgtcaagcccaggcgccgtcccatgcttatcgccgccggtatcgccatcgtgatagtcggcgcgctcctcatcactcagttgattcgctccgcccaaaccgagcatcgcgtgctggaagtccacgccgatgtggctcgcggcgaggtcatccgtgacaccgatctggtatcggtgactgtcggccaggtcgacaacgtatcaacggttcccgcagaccagctcgactcactggtcggcaaacgcgccacggcagatcttcgagccggatcactcttacctgctggggctatcggcccggccgatgtcgttccagctccgggcaagtcgctggtcgggctgaagctagccgccggacagatccctatcggagaccttgctgccgggacgaagctgcgcctgatccagacgtcggcacccagcggctcatccaccaccactgatagcagcaccaataccgatggccagtcgtgggaggcaacaatggcgaccggcaccaaaaagaccgagcaggtcaccttgatcaacgccgaagtgaactcgcgtgatgccgcccggatcgcccaactgacgtcacagggccgtatcgccgtagtgaaggatccgatccgatgagcaccattgttttgaccagcgtctcgggagccccaggggtcaccacgacagcgatcgggctgggcagggtctggccacaatcgagcctggtcgtcgaggatgacacccaccacgccatgctggcgggctacctgcgagcctcccagcacgccgaaccgaacctggccgcagtggcgaacctgacgtcgactccaaccaacgcccaaacggtgtgggaatctatcgccagacccctacccaccgatgacccagtcggcgggctgcgacgcaaaggcatcctcggcccgcccacgccgtggtctcgcgcaggcatcgacccccgatggggattcatgctggccctgtggcggcaactggaggaggctggcatcgacaccatcatcgatttgggtcgcctagccacaccactgacctcaacgccacacctgatcgccgcacccatcgtcgaggacgccgacatgatcttggtgatgatcgaggcgacactacgcgacatcgccggcgcccgcacgatggtggagggactcgctgagcagatgaacttggccggcgcctaccgacgtctcggactgcttgtccaccgtggcggccaggcccgcggcgtcgccgagttcaatgacaaggagatcacctcggcgttacgactcccggtcatcggggccattacccatgacccggccggagccgcccaactctccgacggggtcgggcagcggttcgacaagtcacgtctggcccactcactatcaaaggtggcggccagcctcgtcgatgccataaacaagcgccacgctgatgacgaggaggatctgtgatggccagttttgctgataatccgttcgacaagctgcgctcccaggatgcggcaagagcttcggtagagcaggagcctgatgccggattagcgtcggagttgttttcgacgtcgtcggggtgggccagctctcagcaggtgtcccaagctcaaccggtgatgacccgttcggagaacgtggattggtcggttgtcgcggagctagccagtacggccactgatgaggttgaggctgagatcagccggtggagttccactcatgatggggtggcgacgctagacattcgccaggccatcgcggagcctgctattgcctcggcggtgtctacgtatgctgaccgacgccagatcgatgtaggggagacctggcctgatctggtacgccagcgataccgcaaggctgtgtgggatcag

SEQ ID NO: 259 - DNA, 4013 bp, Propionibacterium acnes
acccttccagcccagcaccacccactacaccgacacgatccacgaagctgaaaccgaacctcccatccccgtccgaaacatcaacgaactcatcaaccccaccaaccatgcatgaacgcacgatcgcctaccggccagccttcctgcgcgacgtgaagcggctcaaaaacaagcactacaacatgaacacacactcaaatgggcggtaaggtcacgaagtcgacgtggctgcctcacggatggcttcggcgagctcttggggtcgactccacatgggccagtggccggttggcagatccatcgcggtgaagttggtcaggtgcgcgacggcgctgaacatcggattgcctgctgcggccagctcgaggacctggacgctgggaatggagcagcagatcaacgtggttagtacatcatggcgagcgctattggacagcgcgacccgtgcccgggccacttgcgcgggttcaggaaccgcccgtgcccggaaccggtcaaggtgctcgttgctgaggccctctaaactggcctgcttgccgagagtatcgaagtcaggaagtggcagctcagctgtttcctcaggtagatctggtgcgaaggcacctccatcgctcatgggaccggagtccacccagacgatccgatggaccaactctgggtgcctgtctacaactaggctcaccggcccgttcgcgccactgtgtcccaccaggaccgcatcgccgcccatctcgtccaggatggctgagatggcgtcagcttggtcgtcgagcgtgcgcgtagtgcgctgggtgtcctccggatcgagacctggcagcgtcagccccacggctcgactgccagcagtgttcaataactcgactacctcgtcccaagcccaggctccgagccagtaaccaggaacgaggacgataggccgatgctggtcaggtcgcgatgttgaagtcatggagacatagttgcacagtgcgcggacaagggagtggcactatttctggcatgaatttagatctgggtgtccggtgaggcgatcagaacgcctccatgtactgtccgagtgtctaggatgcagcggacacagtcgagcagctggctcacaagtttccaggtgtccttctgcccctatgagggaagtcggctgctctcgcaacctttgagggctgctctggggtcggaaccagttacagatcgttcaagttccgggaactaccgccggtcacgctgattgattcccgggcgatctcgcttctgacgacagtggtcggtgaccgagaggagtcctactctgaccccgctgctgcggtgagtaaatcacgggcgtcccggatccggccacccgtccaagtgccagccagcttgatcggctaggcatcgtcaaggagcgacgatgaggtgatgatgcgatgtgagcgcaccgcgaagtgaggtataaagaagccttcccgggcgcatgcgtcgcccaggaaggccaggttggcccctggacggctgaatggttgggcggatcaggctgtagcggagacgtgcagtacctcgtaggcgatggcgttggttgggctctggtctgcatcgtggctactgagttcgacgaggatgacggtccaggtggtgatgtcgacggcggtgacgcgggcgatggtggaatcagtggatgctgcaaggaagtcggcggttatgtcttcgatgcagtgggacggagcagtgctggtgggcaggggcacggtcttgacggtcaggcttcgggcagcagagtaatcggcggttccgttaacaagctggtggacggtccagtcctggatcgggtgccggccgaagtcgcgtacgatagccgagtaaccaagttcgccccagcagaactggcgcatcccctctatgtcgcgccagacgtagaagggcgcgtaggagttctggggtgcgcctttgaccttttcttggatgaggtaggccttgaactccagtccatggtagccgtccatgaggtgtccagtctggatgacgcggtcgcggatgatctgcatgtcatagtcggtgggcagggtgatctgatattgcatggcgtacatcagcggttctccttggtttcgtgggagtaggtcgtgggggtgacgggttcctgccaatcgatggttgacaagtcgtcggcggcttgttggtaggtaaggtggatcattggctgtttgagtgcagcgccatgccagtgtctctggccggcgtcgatccagatggattcgcccttggtcaggtgctggggtgcttgtccttcaatatggaccagggcaacgccgcccgtgacgtagaggccctgtcccttggggtgtgtgtgcctcagcggcaaacgtgacggcgtgggcggcacgcccggcgtcttccgtggcacgatcggccggatccatggcggcgcgcagctgctgttctgcagccaggcgtccaggtcacggcgggcagcatcgacacccagggcagcctcgacggcttcagggctacgacgctggccgggctggttgaccgcagaccactggtgccgggcgtcgtccagatcatggccggcggcgtcgatgagggcggtggtggcttcggcgcagcatcgcctgatccactccgaacgtgacaggccagctgtctcggcggcactgtcaatgcgcgccaggagagatttcatgggcgctcatctgtagcctccagataggcgttgatgtagcgcagagcctgatccgtcatgtcgatggcggctgcctcggcagacgacacaacgggctgtggatgataagaccacccaacatagacggcgaacatcaatttctcgacagctttcatgaggtccccggcggcaaccgcatccgcctcatcatccgaggagaaccacttcaggtctgaacggctgtacatagcccctaggtcctgatgtgggtcgaggtccttggaatgatggaagttcctacacacccatcgccaaagacctcaacatggacaacgctaccttcaccactccctcatctgtgaagagccagtttatgcacggtgttgaaagaggcgtcggtctacgacgaatgcgggttaatggtcttgcggtgtggggcgctgggcgatggcatcgagaacgcgtgagtgggtggcgatccattcggccgcgtcggggttgatgttgcgggcgacggtgtcgatcgctgttacgtagtgggcaagcctgcgaatctcagcttgttggtcagggtgagcgctgatgaggggctcttgatgggaggcgcggttacggacgtggcggatgagctccacgttttcctcgaagtcgcgtcggctacgccccgggtagtgaggcatacctccgttacgtaagtcagtgagagctttccatacggttgcttccaggcgcggggtgagcagaaagcgccagttgtccagtgacagactcgccacgatctgatcaggggtcgcatcgagcctcgcgcgccgcagtcgcttctcggccctgtcgacgttacgcgggaaaccaccgagccgatagctcggggattcccaccaacgccgtatgccagtatcggcgctcaggcgcacgtcaatgaagtttctcaggagtacctcgacatggctgatgtcttccaagaacgctttcgagatgcgggtgttccacacgtaccacgcatcgactggttcgatccggtagcggctgagcctggcgggtgagaaccactcctgcaacgtctcacgactcaccgtgggagcgtggtaagattgatgacgataggcctcgggaaggtcaatgccgcgaaatatcggtatacccccgaggtcattgtcttgcccaggcccctcctcgcatacttgcggggcgtcattggctgccgtcatctcgtctcttcccggtacgtggctgtccatgttcacgggcaggtacggcaatgaggttcccgcacacaaacctctaccaaacatacgctggcaagccgttgcatgagacgacgcctccgcccgccacaccaacggtcaccgccacggccacggtgacggtgaccgtg

SEQ ID NO: 260 - DNA, 3969 bp, Propionibacterium acnes
gacgatcatcacgtacccgttagatcgtcgccctgacaagatcgctgcgaacctcatcctcgacacgttgcaccgggttacccggttttggcgtgctgattcccccgatgaggaagaggctcacggtctggtgcccttccctgacactctcatcgccccagagcccgatgaggacgtcacagctagccaggccatcgccttggcggtggaccgcaactggattaccgaggacctagcccgcctcatgagccatatttactgtgacggtatgactggagctgatgcgggtcgtctgcatggctgcgctccagctacggtgcgatctcgatgccgtgatggtcgggccgtgttgcagcgcaacgccgagacgatcctggccgtctgctgatccctctcttgctcatgcctgccgccaccctacccctacctgctagaaacatagccatgtctccagcaacgcatctagcatatcttctagcaattgatctagctaccatatagctgatgatctagctatcatatagctgtgtctccagcccaaaggacagcccaatggcatgcttgccacaggaaggtgcgtcagcctcccgaaatactggaaggagctttaccgtgcaggacatgacctcgaccagaccgattgaccgatccccgttcgaccgcactattgcggtgtggaaccacaaaggcggcacgttcaagacgtccgtcgtggcgaacctgggatacctgttcgccgccggtggcaacaaggtgttgatggtcgacatggacccccaggccaatctcgacattgacttcggtatacccgcgggagaacgtgaacggggcatgggattagccgaggcgctacgtgaggggacggcccttcccccaccgcagcatctcagcgaaaaccttcacctggtcagtggcggcccggccctccacgagttcaccgaccccgcatccttagcggccatcctcgaccgagtcaccaccgcacgctacgacctgctagctcaggcccttgccccgctggcctgggactatgacctcatcttcatcgactccgggccggcccaaactctgctgtcccagaccatccttggagtagcccgctggctggtagtgcccacccgcaccgataacgcctcaatcactggcctcgtcgacgttcaagacgccatcgacggggttgcctcctgcaaccctgaccttcaactactcggcgttgtcctagccggcgtgggggcccgggccacccggatcgccgcagataaacgccacgccatcgacacagtgctgggggcaggaaccgttttcgatgcggtcatccactactccgagaaggtgtccgtgctcgcacgccagcagggcaagaccgtcgccgagctagccaacgactaccacaacacccagcccgcctacacctacctagctaaaggccagaacatccccaacgtcgccaaggcagccgtcagcatcgaaactgattatctgaggctggccaccgagatcagcgaccgcatgttcaccagcgacgagcaggagcctgatcatgactgacgatccgactccatccgagcagaacaaccccaccagcgacgacatgcgcttggccgaagaatgggccaacagcggccgcacagtgggagccctgccgcgccgtcaacggcctcagcgacccacaccccgcaccaccagccaaccccctgtctcgtcccctgacacaccggctccgaaaaaaccccagaagacccccaccagccagcctggccgtcaacggatcaacgtcaccgtctacgttgtgcccgaactccatgagcggctgcgctcccgatcggcggcgacgggggtgacggtctcggatctggtggtgcatgcgttagcgttcgtcgccgatcatgcgggggaggcgatcgccgatgatctgcgcgtcgagacgggccccggcatgggggccggactgttcgatgtgaccccatcgcggccagtaggggtcgccaaaacccagctgggggtgcgaatgacccgccacaacaaggatggtttggaccagctgacccggacgagtggagcccgtgaccgcagccatcttgtgtctgtcgccgtgcgcgactatctcgactccaaccctgtaaagaaaggccgacatgtccgctgatgaaactcctgccgcccggggtgggcgacgctttgatacgaccgtcaagcccaggcgccgtcccatgcttatcgccgccggtatcgccatcgtgatagtcggcgcgctcctcatcactcagttgattcgctccgcccaaaccgagcatcgcgtgctggaagtccacgccgatgtggctcgcggcgaggtcatccgtgacaccgatctggtatcggtgactgtcggccaggtcgacaacgtatcaacggttcccgcagaccagctcgactcactggtcggcaaacgcgccacggcagatcttcgagccggatcactcttacctgctggggctatcggcccggccgatgtcgttccagctccgggcaagtcgctggtcgggctgaagctagccgccggacagatccctatcggagaccttgctgccgggacgaagctgcgcctgatccagacgtcggcacccagcggctcatccaccaccactgatagcagcaccaataccgatggccagtcgtgggaggcaacaatggcgaccggcaccaaaaagaccgagcaggtcaccttgatcaacgccgaagtgaactcgcgtgatgccgcccggatcgcccaactgacgtcacagggccgtatcgccgtagtgaaggatccgatccgatgagcaccattgttttgaccagcgtctcgggagccccaggggtcaccacgacagcgatcgggctgggcagggtctggccacaatcgagcctggtcgtcgaggatgacacccaccacgccatgctggcgggctacctgcgagcctcccagcacgccgaaccgaacctggccgcagtggcgaacctgacgtcgactccaaccaacgcccaaacggtgtgggaatctatcgccagacccctacccaccgatgacccagtcggcgggctgcgacgcaaaggcatcctcggcccggccacgccgtggtctcgcgcaggcatcgacccccgatggggattcatgctggccctgtggcggcaactggaggaggctggcatcgacaccatcatcgatttgggtcgcctagccacaccactgacctcaacgccacacctgatcgccgcacccatcgtcgaggacgccgacatgatcttggtgatgatcgaggcgacactacgcgacatcgccggcgcccgcacgatggtggagggactcgctgagcagatgaacttggccggcgcctaccgacgtctcggactgcttgtccaccgtggcggccaggcccgcggcgtcgccgagttcaatgacaaggagatcacctcggcgttacgactcccggtcatcggggccattacccatgacccggccggagccgcccaactctccgacggggtcgggcagcggttcgacaagtcacgtctggcccactcactatcaaaggtggcggccagcctcgtcgatgccataaacaagcgccacgctgatgacgaggaggatctgtgatggccagttttgctgataatccgttcgacaagctgcgctcccaggatgcggcaagagcttcggtagagcaggagcctgatgccggattagcgtcggagttgttttcgacgtcgtcggggtgggccagctctcagcaggtgtcccaagctcaaccggtgatgacccgttcggagaacgtggattggccggttgtcgcggagctagccagtacggccactgatgaggttgaggctgagatcagccggtggagttccactcatgatggggtggcgacgctagacattcgccaggccatcgcggagcctgctattgcctcggcggtgtctacgtatgctgaccgacgccagatcgat

SEQ ID NO: 261 - DNA, 4012 bp, Propionibacterium acnes
acccttccagcccagcaccacccactacaccgacacgatccacgaagctgaaaccgaacctcccatccccgtccgaaacatcaacgaactcatcaaccccaccaaccatgcatgaacgcacgatcgcctaccggccagccttcctgcgcgacgtgaagcggctcaaaaacaagcactacaacatgaacacacactcaaatgggcggtaaggtcacgaagtcgacgtggctgcctcacggatggcttcggcgagctcttggggtcgactccacatgggccagtggccggttggcagatccatcgcggtgaagttggtcaggtgcgcgacggcgctgaacatcggattgcctgctgcggccagctcgaggacctggacgctgggaatggagcagcagatcaacgtggttagtacatcatggcgagcgctattggacagcgcgacccgtgcccgggccacttgcgcgggttcaggaaccgcccgtgcccggaaccggtcaaggtgctcgttgctgaggccctctaaactggcctgcttgccgagagtatcgaagtcaggaagtggcagctcagctgtttcctcaggtagatctggtgcgaaggcacctccatcgctcatgggaccggagtccacccagacgatccgatggaccaactctgggtgcctgtctacaactaggctcaccggcccgttcgcgccactgtgtcccaccaggaccgcatcgccgcccatctcgtccaggatggctgagatggcgtcagcttggtcgtcgagcgtgcgcgtagtgcgctgggtgtcctccggatcgagacctggcagcgtcagccccacggctcgactgccagcagtgttcaataactcgactacctcgtcccaagcccaggctccgagccagtaaccaggaacgaggacgataggccgatgctggtcaggtcgcgatgttgaagtcatggagacatagttgcacagtgcgcggacaagggagtggcactatttctggcatgaatttagatctgggtgtccggtgaggcgatcagaacgcctccatgtactgtccgagtgtctaggatgcagcggacacagtcgagcagctggctcacaagtttccaggtgtccttctgcccctatgagggaagtcggctgctctcgcaacctttgagggctgctctggggtcggaaccagttacagatcgttcaagttccgggaactaccgccggtcacgctgattgattcccgggcgatctcgcttctgacgacagtggtcggtgaccgagaggagtcctactctgaccccgctgctgcggtgagtaaatcacgggcgtcccggatccggccacccgtccaagtgccagccagcttgatcggctaggcatcgtcaaggagcgacgatgaggtgatgatgcgatgtgagcgcaccgcgaagtgaggtataaagaagccttcccgggcgcatgcgtcgcccaggaaggccaggttggcccctggacggctgaatggttgggcggatcaggctgtagcggagacgtgcagtacctcgtaggcgatggcgttggttgggctctggtctgcatcgtggctactgagttcgacgaggatgacggtccaggtggtgatgtcgacggcggtgacgcgggcgatggtggaatcagtggatgctgcaaggaagtcggcggttatgtcttcgatgcagtgggacggagcagtgctggtgggcaggggcacggtcttgacggtcaggcttcgggcagcagagtaatcggcggttccgttaacaagctggtggacggtccagtcctggatcgggtgccggccgaagtcgcgtacgatagccgagtaaccaagttcgccccagcagaactggcgcatcccctctatgtcgcgccagacgtagaagggcgcgtaggagttctggggtgcgcctttgaccttttcttggatgaggtaggccttgaactccagtccatggtagccgtccatgaggtgtccagtctggatgacgcggtcgcggatgatctgcatgtcatagtcggtgggcagggtgatctgatattgcatggcgtacatcagcggttctccttggtttcgtgggagtaggtcgtgggggtgacgggttcctgccaatcgatggttgacaagtcgtcggcggcttgttggtaggtaaggtggatcattggctgtttgagtgcagcgccatgccagtgtctctggccggcgtcgatccagatggattcgcccttggtcaggtgctggggtgcttgtccttcaatatggaccagggcaacgccgcccgtgacgtagaggccctgtcccttggggtgtgtgtgcctcagcggcaaacgtgacggcgtgggcggcacgcccggcgtcttccgtggcacgatcggccggatccatggcggcgcgcagctgctgttctgcagccaggcgtccaggtcacggcgggcagcatcgacacccagggcagcctcgacggcttcagggctacgacgctggccgggctggttgaccgcagaccactggtgccgggcgtcgtccagatcatggccggcggcgtcgatgagggcggtggtggcttcggcgcagcatcgcctgatccactccgaacgtgacaggccagctgtctcggcggcactgtcatgcgcgccaggagagatttcatgggcgctcatctgtagcctccagataggcgttgatgtagcgcagagcctgatccgtcatgtcgatggcggctgcctcggcagacgacacaacgggctgtggatgataagaccacccaacatagacggcgaacatcaatttctcgacagctttcatgaggtccccggcggcaaccgcatccgcctcatcatccgaggagaaccacttcaggtctgaacggctgtacatagcccctaggtcctgatgtgggtcgaggtccttggaatgatggaagttcctacacacccatcgccaaagacctcaacatggacaacgctaccttcaccactccctcatctgtgaagagccagtttatgcacggtgttgaaagaggcgtcggtctacgacgaatgcgggttaatggtcttgcggtgtggggcgctgggcgatggcatcgagaacgcgtgagtgggtggcgatccattcggccgcgtcggggttgatgttgcgggcgacggtgtcgatcgctgttacgtagtgggcaagcctgcgaatctcagcttgttggtcagggtgagcgctgatgaggggctcttgatgggaggcgcggttacggacgtggcggatgagctccacgttttcctcgaagtcgcgtcggctacgccccgggtagtgaggcatacctccgttacgtaagtcagtgagagctttccatacggttgcttccaggcgcggggtgagcagaaagcgccagttgtccagtgacagactcgccacgatctgatcaggggtcgcatcgagccccgcgcgccgcagtcgcgcctcggccctggcgacgttacgcgggaaaccaccgagccgatagctcggggattcccaccaacgccgtatgccagtatcggcgctcaggcgcacgtcaatgaagtttctcaggagtacctcgacatggctgatgtcttccaagaacgctttcgagatgcaggtgttccacacgtaccacgcatcgactggttcgatccggtagcggctgagcctggcgggtgagaaccactcctgcaacgtctcacgactcaccgtgggagcgtggtaagattgatgacgataggcctcgggaaggtcaatgccgcgaaatatcggtatacccccgaggtcattgtcttgcccaggcccctcctcgcatacttgcggggcgtcattggctgccgtcatctcgtctcttcccggtacgtggctgtccatgttcacgggcaggtacggcaatgaggttcccgcacacaaacctctaccaagcatacgctggcaagccgttgcatgagacgacgcctccgcccgccacaccaacggtcaccgccacggccacggtgaccgtgaccgtg

SEQ ID NO: 262 - DNA, 811 bp, Propionibacterium acnes
attttgtccacccacccctgtcgattttgtccgccaagtattagacaaaccattagacagtgaattagaccctgggtcgcgtcagcgtgttagctcaccaacgcgcgcgcgcgcggcggccgagccgccgaagccaaagaaacccataccaccaacgcctgaaccagcagcccccgcttcagacagtcctgtgtcagcgcacgctgatgaggctgccgagttggcgtggcagttcgtggggtggtgtcctcagctggtaggggcaccgaagaaggtgcgtggccagctccgtcagctggtcgctgccgagatccgccggaatccgggctggctggatgcgccagcgttggaggttgttgcccagcgggtacgtgctgaaggtgcgctgggggtccagcactgcgagattgtgcgagccgagctgcacggggtgatcgccgaccagaaggccgcccccgcccgccccgacgccctgcacgcgcgggagcccaagtggtgggacgacgtgtactacgaaggaaacacaaccgtgtggacgtacgactctgacgaaaccagtgacgacgacgaggcgtggaaccggtcgcaggtatgtcatgttgctgagcgtgacgacatggctggcgggattgctaccaacctgctggcctcccacgctgatgatccgatggcctggctgactcgccgtcaaaccatgctgatggctcgtttcccccacgcccagaacgaggtcaccgcgatgtgccaaatcgtgcgcaccgccctggaggccgacctggccgccggaacccggtgggaggaccgatgaggg

SEQ ID NO: 263 - DNA, 3790 bp, Propionibacterium acnes
tagccgacacggcggaccgtgcccctgacagtaagcggcactactggagacatcaccatgaccgctcagatcctcgccccgtgcaaccagaaggctgccgtcatcgaaggagccctgccatgaaccaacctaccccccacaaggccgacgagtcacagacgagcaacaccacgaggaagtggcggcacaaggtgtcgttctaccaagacccggccgacaccgaccgagtccgcggagcgatcctccacaccatgacaaccgaaggcaaccggaacctgagccagttcgtcaacgatgccgtcatggccaaggtgaccgaactggaagcaaaatacaaccacggcgagccattccccgccgtgggagcccgaggactcccccagggcggcgcagccgccaacagataagagggcggggaccaccaatagcagtcgatttcggatccagatcgggtagacaggacccatgatgaatttcatatcctccctgctctcggccatcctgaccctctttgcgatggtagccgtggcgataggagtggtgaacattgtgccgggaatatgcgccatcatcggtgcacggaaatacggcgaccaggaccgtgtgcgggcaggacaacgaaagatccttcttggtgctatcgccttggtggtagcagtaggcattcacccgtgacccacggttaccggaagccccgccgcaatcgataccactgtcagtaccatcaggggcgataggggtcaagctctccttgtcacaatcccttccccggcagcccagtaaccgtcgcttacagccatacatggatatgcgcccattcgtcggcaccgacgccgtgcgggttggcgacgctgacccgtctgctcacaaacgacccttccagcccagcaccacccactacaccgacacgatccacgaagctgaaaccgaacctcccatccccgtccgaaacatcaacgaactcatcaaccccaccaaccatgcatgaacgcacgatcgcctaccggccagccttcctgcgcgacgtgaagcggctcaaaaacaagcactacaacatgaacacacactcaaatgggcggtaaggtcacgaagtcgacgtggctgcctcacggatggcttcggcgagctcttggggtcgactccacatgggccagtggccggttggcagatccatcgcggtgaagttggtcaggtgcgcgacggcgctgaacatcggattgcctgctgcggccagctcgaggacctggacgctgggaatggagcagcagatcaacgtggttagtacatcatggcgagcgctattggacagcgcgacccgtgcccgggccacttgcgcgggttcaggaaccgcccgtgcccggaaccggtcaaggtgctcgttgctgaggccctctaaactggcctgcttgccgagagtatcgaagtcaggaagtggcagctcagctgtttcctcaggtagatctggtgcgaaggcacctccatcgctcatgggaccggagtccacccagacgatccgatggaccaactctgggtgcctgtctacaactaggctcaccggcccgttcgcgccactgtgtcccaccaggaccgcatcgccgcccatctcgtccaggatggctgagatggcgtcagcttggtcgtcgagcgtgcgcgtagtgcgctgggtgtcctccggatcgaggccaggcagcgtcagccccacggctcgactgccagcagtgttcaataactcgactacctcgtcccaagcccaggctccgagccagtaaccaggaacgaggacgataggccgatgctggtcaggtcgcgatgttgaagtcatggagacatagttgcacagtgcgcggacaagggagtggcactatttctggcatgaatttagatctgggtgtccggtgaggcgatcagaacgcctccatgtactgtccgagtgtctacgatgcagcggacacagtcgagcagctggctcacaagtttccaggtgtccttctgcccctatgagggaagtcggctgctctcgcaacctttgagggctgctctggggtcggaaccagttacagatcgttcaagttccgggaactaccgccggtcacgctgattgattcccgggcgatctcgcttctgacgacagtggtcggtaaccgagaggcgtcctactctgaccccgctgctgcggtgagtaaatcacgggcgtcccggatccggccacccgtccaagtgccagccagcttgatcggctaggcatcgtcaaggagcgacgatgaggtgatgatgcgatgtgagcgcaccgcgaagtgaggtataaagaagccttcccgggcgcatgcgtcgcccaggaaggccaggttggcccctggacggctgaatggttgggcggatcaggctgtagcggagacgtgcagtacctcgtaggcgatggcgttggttgggctctggtctgcatcgtggctactgagttcgacgaggatgacggtccaggtggtgatgtcgacggcggtgacgcgggcgatggtggaatcagtggatgctgcaaggaagtcggcggttatgtcttcgatgcagtgggacggagcagtgctggtgggcaggggcacggtcttgacggtcaggcttcgggcagcagagtaatcggcggttccgttaacaagctggtggacggtccagtcctggatcgggtgccggccgaagtcgcgtacgatagccgagtaaccaagttcgccccagcagaactggcgcatcccctctatgtcgcgccagacgtagaagggcgcgtaggagttctggggtgcgcctttgaccttttcttggatgaggtaggccttgaactccagtccatggtagccgtccatgaggtgtccagtctggatgacgcagtcgcggatgatctgcatgtcatagtcggtgggcagggtgatctgatattgcatggcgtacatcagcggttctccttggtttcgtgggagtaggtcgtgggggtgacgggttcctgccaatcgatggttgacaagtcgtcggcggcttgttggtaggtaaggtggatcattggctgtttgagtgcagcgccatgccagtgtctctggccggcgtcgatccagatggattcgcccttggtcaggtgctggggtgcttgtccttcaatatggaccagggcaacgccgcccgtgacgtagaggccctgtcccttggggtgtgtgcctcagcggcaaacgtgacggcgtgggcggcacgcccggcgtcttccgtggcacgatcggccggatccatggcggcgcgcagctgctgttctgcagccaggcgtccaggtcacggcgggcagcatcgacacccagggcagcctcgacggcttcagggctacgacgctggccgggctggttgaccgcagaccactggtgccgggcgtcgtccagatcatggccggcggcgtcgatgagggcggtggtggcttcggcgcagcatcgcctgatccactccgaacgtgacaggccagctgtctcggcggcactgtcatgcgcgccaggagagatttcatgggcgctcatctgtagcctccagataggcgttgatgtagcgcagagcctgatccgtcatgtcgatggcggctgcctcggcagacgacacaacgggctgtggatgataagaccacccaacatagacggcgaacatcaatttctcgacagctttcatgaggtccccggcggcaaccgcatccgcctcatcatccgaggagaaccacttcaggtctgaacggctgtacatagcccctaggtcctgatgtgggtcgaggtccttg

SEQ ID NO: 264 - DNA, 3861 bp, Propionibacterium acnes
gctgagaaaaattttgggtccgccctgcatatcggggcctcttcataccttcaaaagtgtgaaggggaatacagactcttcgactggaattaaaatggtatatggcgtgtccgggccgcacccagctccacgatgcgccataggggagccataacttcaccaatcgtatacgatatgagtgtgggtgagcatctaccggtggccgacagtcagatacaagcatgggcggatgaagcagaagctgattatgacctcagcatgcttccgccgtctcgacgtggtcgcccaccggtggggaggggcccgggcactgtggtccctgtgcgcttcgacgcggacactctcaaggcgttgtcacaacgagcccatgacgaaggattgaccacgcgttctgacgcgatccgtgctgcggttaaccagtggctcggcctcggctcgtaaacattatcggcgcgacaaccttactgatgacgctgttggttacgccgtagagcacatcttgtactcgtgggcgctcgacgatgctgatgatcctcggtgctggatgatgattcggtgttgacccagctggcctcctcatggagctagttatcctcatctacgacgatggctatgaactcctgatccacgccatgaaagcccgccctcagtatctgagctacttcgctatctagtgttgttgggcgagttgaactcaacttttctccgacgcaagcgccaataaaaggctgatccatccgaataccaccaaacacggctgaagtgtggaacagattcagcaagacagggtgcggtgctcgggtgcgttggggagatgaggatattcaggcttctggcgggatgtggcttgatgacgtccaggatcaccggttcggttttgaaggtgccttgcattaatgtcgacagggtcgtacgactcgaggattggatcgaccagcccgttgcgtctgaagaacttcatccaccccggtggagctccggccgcgtactggtgcaacggatcattagcatgggtagcgtgagtatgccttcgatcgtggtcagtgctgtcatcatccaagattctgacgggcggcttctcactgtccgtaaacgaggcaccgaggcattcatgctgccaggcggcaagccggagcccggcgaggactcgcgtcaggcagtagtccgggaagtgcacgaagagctcggcgtcgcattgtcttccgacgacctgcgtcgggtgggagtgttcaccacgcgagcagcgaatgaggccggccatcaggtggtggcgacgattttcacccacaccccggttgcggtgagtgagccagctgctgagatcgagcagattcgttggctcgattggagtgtcgacgccctgcctgacgacctggccccgctgctggtcgaggcagtcatcccgtggctgcggcgccgtatccggtcggtcgctgtattcacgggtgcgaaggatggaaccgaccctcattatcgtgtcgaagcaaccgccttgggccggggtctcgcacacgccgggatcaccctggtttatggcggcgggaaggtcgggatgatgggtgctgttgctgatgcggccctcgctgctggcggcgctgtgatcggagtgatgccgcagcacttggtggacggggagatcgcccatcctagtctgactcacctcgaggtagtgcggactatgcatgagcgcaagcagcggatgagtgacctagctgacgcgttcgtcgcgctacccggcggcggcggaacccttgacgagctattcgaagcatggacatggcagcagctcggtgtacacagcaaacccgtggccttgtacgactcgaccttctgggcaccgctgaccgcgctactcaaccacatgaccatcgaaggcttcatccgccctgaggaccgcgcctcgctcgtgatcgccgataccatacatcagctgatggccgatcttgagggatggaccccaccaccaccgaagtggcgctcgtgacatagaacaaatgattctgactatggctcattgacatctgcgcagcggctactagctccattgacttcaaatcgggccttggccgaggctcggttcaggtggcccggaatggatccccacaaattgaatgctcatgatcgaggtgatgaacgcccactctattgtcctacgcccggttgtatccagcgagcaattgaaggtgctgcgcctgttggtcgaccaggccgagccactcatcatcgacgggcgcatcttgtacgaggcatgggacaggctgcaaacagcccgtccggcccgctagaaaaaatttttagggcccgctccgcacatcccggtctgtacccacaccttcaagggtgtgaagggaataaaaacacacctaacaacaactttgtttcatgatttggcgcgtcggaccctttctgaccgatgtcgtgcgcaacaatggacccatgagttcgcctaccaagatgcgccggaaggggacacgcggcccgaaacctcgcagcgacgaggagctaacggctgtgatgttccgcgtcccagagtcagtggccgaacgtgtcagcgatatggcttgggagctgaggctctcccgatccgatcttgtgggctggtcggccctctatgcactcaactcgatgctcagacagcgcggagaggacacgattccggttccggagtatctggacaaggccgtgctcgctgcgttgtatcccgatgggttgcccttcgacgaggacaacgaggagccgggcgagaatgccgggcaggaggagcttgcgatgactggatgagcccgaacatggttgaaggccgccccgccaggcgaccttcaatcaatggtttcggttgtcagctgcagccacccttgccaggtgctgtggttcttctccagaggaggagggaccgccatgaagaccaagaagacctagaagatccaaaagaaccggtttcggctgttgcttcggtcttcatggtagctgatagcccgcgtcgttggaagtgcgacgacgccgatcctcatcggtatcgcaccctgttccagggtcgagaatgtgaaggattaacaaccatgacaagtcatgaggcgtcctcccggagggcgtcatgaccgctttaattcaagctctgccgacagctgaactgtctgctggacctggtgctagcggtccagctagaccctctgctgagggcttcatcaagattcatcacgaccttattagtgcgggcgtgtcgggtaacgcgatggcgttgttcgtcgcgttacgtaaccagcccggctgtgatcagtggacccgtcactcgtacctgcggctagcccaatggtgcggctgggatgggctgtcggaggcggcgggctgtaagcgggtgcagcgggccgctgctgagctcgctagcggtggttggctggaatcgcgggtcggccatgatcgtcgcaccgctaagacgctggtgtggcatcggttgaccagccccgacaccgaccgctgggagcaattgccgcggattgtgtgggcgaggatctgccagatcgccggggagacgtcgggagagtgggtgaggcattggctggtgtggcggatgctggccggtcgtactggtgtggctcaggcccctatgtccatcgtggctcggttcctgggctgttcttcgcgccaggtctctcatatccgtggggctctcgttgatgccggtctgctcggctgtgacgaggtgtcgggggcggcgagccgggtgtggttcccctcgatggccgaggagtgtgcagcggatcgtgaggtggtcgatggggccgtcgtcggtgctggggtgggctctggtgaaggtgtcgaggagggcggggaacccctgtcgattttgtccacccacccctg

SEQ ID NO: 265 - DNA, 2093 bp, Propionibacterium acnes
caggtgggtttgaccgccagcgtcggattggtgctggtcgctgggctgatcaccactctcaaccgtcgttaccggacccggttcacccgccagccccgcggcaaggccatgaccctgcccagcccggacgcccaaactgccgagatagcgctgcgcagcaccagagcagccgagactctgacgatcacctgcctcgaccacgcgctccgcgcgatcggcgcatggtgccaccactgcgggcacccgctgccacccctgctggccgcccgcgtcgatgacgaccggatcgacctgctgctatcccaggcggcccccgaccatcccgaggcggtggagctggccgccgacggatcggtgtggaccctcaccgccgaccggatcgacgacctgctagcccacaccgatgacaaccaagcggctccgtggccgtctctggtcacactgggacgcgacgacgacggcgcccacatcctcatcgacttggaagccgcaggaaccttgcacctgatcgccgatgacgaccaggtcgacgcggccctcgccgcgatcgccgtggaactggccacctgtgactggtccgacgaggtcaacgtcaccctggtcggccaggtgtgcccgggcctagaagacgcactagagtctccgaccctgacccgcgccaccgacgtggacgccctcctcaccaccctggaagctcgcgccgacgaccagcgacacatcctcaccgaaggaagccccctcgccgctcaccgagccgaccccgccatctccgacgggttcgacgccgaagtgatcctcctcgacaccgaactcaccgaagaccaccgcaaccgcctcgccagcctcgtcgaggctcttccccgcgtgtcagtcgccgcggtaacaaccagccccaccagcccacacgaatggtccctcaccctgacaggtgacccactagccgccgacgtggctcccctcggctggcacatccacccccaaaccctctcccccgacctgtacaaccgcgtggttgaactactcgccaactccgccgccgcagactacgaacccgccagctggtggaaccacgacgccgacgacgagcccaccaccggccccaccaacgaggaagaatctaccccgagcaggcgagcccgcccgaatatccgcctgaccaccctgaccggcggcatcgacctatccagcgtcgacatcgacgacatcatcgacgaagccaaccaggccctcgacaacaccgacgaggccaccgaccaggttcgtgtcgacaccgaccaacccggcaccgacacccccttccccatcgacgacatcgacccgctgagctccgaccacccggtcctatccatcatcggccaccccgacatcacaggtgccactggaaccgttgggcgctccccgtggcgctgccaacagttggccctctacatcgctgagcatccgggagcatcgggggcgactatcgccgatgatttggggctatcagcgtcgacggtgcgctcgattgctacacacctgcgacactggttgggagccgacgatgccggggtggcttacatgccggcggcgacgcgcggctaccggctcgatgagcggatcgtcacagatgtggacctgatcgacgctgctgtggccggggcaggcattaacaccgctgagacggccacactggtggccattttgaagctgggccgcggacgggtcttcgctggggttcctgaatcggaacttcgccagttcagggcgtcgatgtaccacgtggaggcccgcatcgtcgatgctgccctccaagtgacagaccgggccctggaagccggggacctggggctggcccggtgggcgttgacccaagggctactggtgtctcccgatcatgaggacctggtcgccggttgtctgcgcaccgagtaccaggccggcaacatggacaaggtcgccgagctggtcgatcacctgtcggctaccgcacgccgactgggcgtcgacctcaacgaggacaccacccggatcatcgatacggtcacccacgccgacaggagagcatcatgatctcccctgcactcatctccgtcaggaaggttcctatgcaccat

SEQ ID NO: 266 - DNA, 650 bp, Propionibacterium acnes
tgcgggtacacctaccagcaggcagccccggaaggcggttataaggtcaccgcaatcacgtcgtgggatgtgacctggtcggtactaggacacacgggcacagtccacatccagaaggccggtgggcagatgcttccggtcggcgagttggagtctgttgttacacggcgatgactcctgatagtccgacgctgtatgaggtgttgggggtctgccctgataccactgatgaccagatcaagacggcgtggcgtcgtgccgcgaaagtgactcaccctgatgccggtggcactagtgaggcgttcgcggccgcccggcacgcctgggaggtgttgtctgatcctgcccggcgcaccgcctacgatgccgacctggcggaggaggatgatcccgacgacgaagccgccgacgccttcgacgttgatccgttcacggcatggccctggtgcgccccgtacatcgacgccacccccaccctgcgccacacctgccccggcacgatcaaggccatcgtggtcgccatcgccgggatcatggccggaatcggctggcaggaagcgctggaggccgtggtgtcgccgccggggtttctgggggcgtgctggatagtctcagtgccggttgtcgtcgcagtgacatggctggcagcg

SEQ ID NO: 267 - DNA, 3863 bp, Propionibacterium acnes
gctgagaaaaattttgggtccgccctgcatatcggggcctcttcataccttcaaaagtgtgaaggggaatacagactcttcgactggaattaaaatggtatatggcgtgtccggtccgcacccagctccacgatgcgccataggggagccataacttcaccaatcgtatacgatatgagtgtgggtgagcatctaccggtggccgacagtcagatacaagcatgggcggatgaagcagaagctgattatgacctcagcatgcttccgccgtctcgacgtggtcgcccaccggtggggaggggcccgggcactgtggtccctgtgcgcttcgacgcggacactctcaaggcgttgtcacaacgagcccatgacgaaggattgaccacgcgttctgacgcgatccgtgctgcggttaaccagtggctcggcctcggctcgtaaacattatcggcgcgacaaccttactgatgacgctgttggttacgccgtagagcacatcttgtactcgtgggcgctcgacgatgctgatgatcctcgttgctggatgatgattcggtgttgacccagctggcctcctcatggagctagttatcctcatctacgacgatggctatgaactcctgatccacgccatgaaagcccgccctcagtatctgagctacttcgctatctagtgttgttgggcgagttgaactcaacttttctccgacgcaagcgccaataaaaggctgatccatccgaataccaccaaacacggctgaagtgtggaacagattcagcaagacagggtgcggtgctcgggtgcgttggggagatgaggatattcaggcttctggcgggatgtggcttgatgacgtccaggatcaccggttcggttttgaaggtgccttgcattaatgtcgacagggtcgtacgactcgaggattggatcgaccagcccgttgcgtctgaagaacttcatccaccccggtggagctccggccgcgtactggtgcaacggatcattagcatgggtagcgtgagtatgccttcgatcgtggtcagtgctgtcatcatccaagattctgacgggcggcttctcactgtccgtaaacgaggcaccgaggcattcatgctgccaggcggcaagccggagcccggcgaggactcgcgtcaggcagtagtccgggaagtgcacgaagagctcggcgtcgcattgtcttccgacgacctgcgtcgggtgggagtgttcaccacgcgagcagcgaatgaggccggccatcaggtggtggcgacgattttcacccacaccccggttgcggtgagtgagccagctgctgagatcgagcagattcgttggctcgattggagtgtcgacgccctgcctgacgacctggccccgctgctggtcgaggcagtcatcccgtggctgcggcgccgtatccggtcggtcgctgtattcacgggtgcgaaggatggaaccgaccctcattatcgtgtcgaagcaaccgccttgggccggggtctcgcacacgccgggatcaccctggtttatggcggcgggaaggtcgggatgatgggtgctgttgctgatgcggccctcgctgctggcggcgctgtgatcggagtgatgccgcagcacttggtggacggggagatcgcccatcctagtctgactcacctcgaggtagtgcggactatgcatgagcgcaagcagcggatgagtgacctagctgacgcgttcgtcgcgctacccggcggcggcggaacccttgacgagctattcgaagcatggacatggcagcagctcggtgtacacagcaaacccgtggccttgtacgactcgaccttctgggcaccgctgaccgcgctactcaaccacatgaccatcgaaggcttcatccgccctgaggaccgcgcctcgctcgtgatcgccgataccatacatcagctgatggccgatcttgagggatggaccccaccaccaccgaagtggcgctcgtgacatagaacaaatgattctgactatggctcattgacatctgcgcagcggctactagctccattgacttcaaatcgggccttggccgaggctcggttcaggtggcccggaatggatccccacaaattgaatgctcatgatcgaggtgatgaacgcccactctattgtcctacgcccggttgtatccagcgagcaattgaaggtgctgcgcctgttggtcgaccaggccgagccactcatcatcgacgggcgcatcttgtacgaggcatgggacaggctgcaaacagcccgtccggcccgctagaaaaaatttttagggcccgctccgcacatcccggtctgtacccacaccttcaagggtgtgaagggaataaaaacacacctaacaacaactttgtttcatgatttggcgcgtcggaccctttctgaccgatgtcgtgcgcaacaatggacccatgagttcgcctaccaagacccgccggaaggggacacgcggcccgaaacctcgcagcgacgaggagctaacggctgtgatgttccgcgtcccagagtcagtggccgaacgtgtcagcgatatggcttgggagctgaggctctcccgatccgatcttgtgggctggtcggccctctatgcactcaactcgatgctcagacagcgcggagaggacacgattccggttccggagtatctggacaaggccgtgctcgctgcgttgtatcccgatgggttgcccttcgacgaggacaacgaggagccgggcgagaatgccgggcaggaggagcttgcgatgactggatgagcccgaacatggttgaaggccgccccgccaggcgaccttcaatcaatggtttcggttgtcagctgcagccacccttgccaggtgctgtggttcttctccagaggaggagggaccgccatgaagaccaagaagacctagaagatccaaaagaaccggtttcggctgttgcttcggtcttcatggtagctgatagcccgcgtcgttggaagtgcgacgacgccgatcctcatcggtatcgcaccctgaaacagggtgttgaacatgaagggttgaccgctatgtcaagccatgagacgccctcccggagggcgtcatgaccgctttaattcaagctctgccgacagctgaactgtctgctggacctggtgctagcagtccagctagaccctctgctgagggcttcatcaagattcatcacgacctcattagtgcgggcgtgtcgggtaacgcgatggcgttgttcgtcgcgttacgtaaccagcccggctgtgatcagtggacccgtcactcgtacctgcggctagcccaatggtgcggctgggatgggctgtcggaggcggcgggctgtaagcgggtgcagcgggccgctgctgagctcgctagcggtggttggctggaatcgcgggtcggccatgatcgtcgcaccgctaagacgctggtgtggcatcggttgaccagccccgacaccgaccgctgggagcaattgccgcggattgtgtgggcgaggatctgccagatcgccggagagacgtcgggagagtgggtgaggcattggctggtgtggcggatgctggccggtcgtactggtgtggctcaggcccctacgtccatcgtggcccggttcctgggctgttcttcgcgccaggtctctcatatccgtggggctctcgttgatgccggtctgctcggctgtgacgaggtgtcgggggcggcgagccgggtgtggttcccctcgatggccgaggagtgtgcagcggatcgtgaggtggtcgatggggccgtcgtcggtgctggggtgggctctggtgaaggtgtcgaggagggcggggaacccctgtcgattttgtccacccacccctgtc

SEQ ID NO: 268 - DNA, 653 bp, Propionibacterium acnes
acgtgcgggtacacctaccagcaggcagcaccagcggggggctataaggtcaccgcaatcacgtcgtgggatgtgacctggtcggtactaggacacacgggcacagtccacatccagaaggccggtgggcagatgcttccggtcggcgagttggagtctgttgttacacggcgatgactcctgatagtccgacgctgtatgaggtgttgggggtctgccctgatgccactgatgaccagatcaagacggcgtggcgtcgtgccgcgaaagtgactcaccctgatgccggtggcactagtgaggcgttcgcggccgcccggcacgcctgggaggtgttgtctgatcctgcccggcgcaccgcctacgatgccgacctggcgggggaggatgatcccgacgacgaagccgccgacgccttcgacgttgatccgttcacggcatggccctggtgcgccccgtacatcgacgccacccccaccctgcgccacacctgccccggcacgatcaaggccatcgtggtcgccatcgccgggatcatggccggaatcggctggcaggaagcgctggaggccgtggtgtcgccgccggggtttctgggggcgtgctggatagtctcagtgccggttgtcgtcgcagtgacatggctggcagcg

SEQ ID NO: 269 - DNA, 3862 bp, Propionibacterium acnes
gctgagaaaaattttgggtccgccctgcatatcggggcctcttcataccttcaaaagtgtgaagggaatacagactcttcgactggaattaaaatggtatatggcgtgtccggtccgcacccagctccacgatgcgccatagaggagccataacttcaccaatcgtatacgatatgagtgtaggtgagcatctaccggtggccgacagtcagatacaagcatgggcggatgaagcagaagctgattatgacctcagcatgcttccgccgtctcgacgtggtcgcccaccggtggggaggggcccgggcactgtggtccctgtgcgcttcgacgcggacactctcaaggcgttgtcacaacgagcccatgacgaaggattgaccacgcgttctgacgcgatccgtgctgcggttaaccagtggctcggcctcggctcgtaaacattatcggcgcgacaaccttactgatgacgctgttggttacgccgtagagcacatcttgtactcgtgggcgctcgacgatgctgatgatcctcgttgctggatgatgattcggtgttgacccagctggcctcctcatggagctagttatcctcatctacgacgatggctatgaactcctgatccacgccatgaaagcccgccctcagtatctgagctacttcgctatctagtgttgttgggcgagttgaactcaacttttctccgacgcaagcgccaataaaaggctgatccatccgaataccaccaaacacggctgaagtgtggaacagattcagcaagacagggtgcggtgctcgggtgcgttggggagatgaggatattcaggcttctggcgggatgtggcttgatgacgtccaggatcaccggttcggttttgaaggtgccttgcattaatgtcgacagggtcgtacgactcgaggattggatcgaccagcccgttgcgtctgaagaacttcatccaccccggtggagctccggccgcgtactggtgcaacggatcattagcatgggtagcgtgagtatgccttcgatcgtggtcagtgctgtcatcatccaagattctgacgggcggcttctcactgtccgtaaacgaggcaccgaggcattcatgctgccaggcggcaagccggagcccggcgaggactcgcgtcaggcagtagtccgggaagtgcacgaagagctcggcgtcgcattgtcttccgacgacctgcgtcgggtgggagtgttcaccacgcgagcagcgaatgaggccggccatcaggtggtggcgacgattttcacccacaccccggttgcggtgagtgagccagctgctgagatcgagcagattcgttggctcgattggagtgtcgacgccctgcctgacgacctggccccgctgctggtcgaggcagtcatcccgtggctgcggcgccgtatccggtcggtcgctgtattcacgggtgcgaaggatggaaccgaccctcattatcgtgtcgaagcaaccgccttgggccggggtctcgcacacgccgggatcaccctggtttatggcggcgggaaggtcgggatgatgggtgctgttgctgatgcggccctcgctgctggcggcgctgtgatcggagtgatgccgcagcacttggtggacggggagatcgcccatcctagtctgactcacctcgaggtagtgcggactatgcatgagcgcaagcagcggatgagtgacctagctgacgcgttcgtcgcgctacccggcggcggcggaacccttgacgagctattcgaagcatggacatggcagcagctcggtgtacacagcaaacccgtggccttgtacgactcgaccttctgggcaccgctgaccgcgctactcaaccacatgaccatcgaaggcttcatccgccctgaggaccgcgcctcgctcgtgaccgccgataccatacatcagctgatggccgatcttgagggatggaccccaccaccaccgaagtggcgctcgtgacatagaacaaatgattctgactatggctcattgacatctgcgcagcggctactagctccattgacttcaaatcgggccttggccgaggctcggttcaggtggcccggaatggatccccacaaattgaatgctcatgatcgaggtgatgaacgcccactctattgtcctacgcccggttgtatccagcgagcaattgaaggtgctgcgcctgttggtcgaccaggccgagccactcatcatcgacgggcgcatcttgtacgaggcatgggacaggctgcaaacagcccgtccggcccgctagaaaaaatttttagggcccgctccgcacatcccggtctgtacccacaccttcaagggtgtgaagggaataaaaacacacctaacaacaactttgtttcatgatttggcgcgtcggaccctttctgaccgatgtcgtgcgcaacaatggacccatgagttcgcctaccaagacccgccggaaggggacacgcggcccgaaacctcgcagcgacgaggagctaacggctgtgatgttccgcgtcccagagtcagtggccgaacgtgtcagcgatatggcttgggagctgaggctctcccgatccgatcttgtgggctggtcggccctctatgcactcaactcgatgctcagacagcgcggagaggacacgattccggttccggagtatctggacaaggccgtgctcgctgcgttgtatcccgatgggttgcccttcgacgaggacaacgaggagccgggcgagaatgccgggcaggaggagcttgcgatgactggatgagcccgaacatggttgaaggccgccccgccaggcgaccttcaatcaatggtttcggttgtcagctgcagccacccttgccaggtgctgtggttcttctccagaggaggagggaccgccatgaagaccaagaagacctagaagatccaaaagaaccggtttcggctgttgcttcggtcttcatggtagctgatagcccgcgtcgttggaagtgcgacgacgccgatcctcatcggtatcgcaccctgaaacagggtgttgaacatgaagggttgaccgctatgtcaagccatgagacgccctcccggagggcgtcatgacctctttaattcaagctctgccgacagctgaactgtctgctggacctggtgctagcagtccagctagaccctctgctgagggcttcatcaagattcatcacgacctcattagtgcgggcgtgtcgggtaacgcgatggcgttgttcgtcgcgttacgtaaccagcccggctgtgatcagtggacccgtcactcgtacctgcggctagcccaatggtgcggctgggatgggctgtcggaggcggcgggctgtaagcgggtgcagcgggccgctgctgagctcgctagcggtggttggctggaatcgcgggtcggccatgatcgtcgcaccgctaagacgctggtgtggcatcggttgaccagccccgacaccgaccgctgggagcaattgccgcggattgtgtgggcgaggatctgccagatcgccggggagacgtcgggagagtgggtgaggcattggctggtgtggcggatgctggccggtcgtactggtgtggctcaggcccctatgtccatcgtggctcggttcctgggctgttcttcgcgccaggtctctcatatccgtggggctctcgttgatgccggtctgctcggctgtgacgaggtgtcgggggcggcgagccgggtgtggttcccctcgatggccgaggagtgtgcagcggatcgtgaggtggttgatggggccgtcgtcgatgctggggtgggctctggtgaaggtgtcgaggagggcggggaacccctgtcgattttgtccacccacccctgtc

SEQ ID NO: 270 - DNA, 2238 bp, Propionibacterium acnes
gacgccggccaccccaactactccgacccacacggtgaccccagctccggcctctgccggccactcgaccagcgacgagcacccactccatacggataccgccgcagcggacaaggccagcaacgaggacgccctgtccccaatccaggtgggtttgaccgccagcgtcggactggtgctggtcgccggactgatcaccaccctcaaccgccgctaccggacccggttcacccgccagccccgcggcaaggccatgaccctgcccagcccggacgcccaaactgccgagatagcgctgcgcagcaccggggcgactgacactctgacgatcacctgcctcgaccaggcgctccgcgcgatcggcgcatggtgccaccactgcgggcacccgctgccacccctgctggccgcccgcgtcgatgacgaccggatcgacctgctgctatcccaggcggcccccgaccatcccgaggcggtggagctggccgccgacggatcggtgtggaccctcaccgccgaccggatcgacgacctgctagcccacaccgatgacaaccaagcggctccgtggccgtctctggtcacactgggacgcgacgacgacggcgcccacatcctcatcgacttggaagccgcaggaaccttgcacctgatcgccgatgacgaccaggtcgacgcggccctcgccgcgatcgccgtggaactggccacctgcgactggtccgacgaagtcaacgtcaccctcgtcggccaggtgtgcccgggcctagaagacgcactagagtctccgaccctgacccgcgccaccgacgtggacaccctcctcaccaccctagaagctcgcgccgacgaccagcgacacatcctcaccgaaggaaaccccctcgccgctcaccgagccgaccccgccatctccgacgggttcgacgccgaagtgatcctcctcgacaccgaactcaccgaagaccaccgcaaccgcctcgccagcctcgtcgaggctcttccccgcgtgtcagtcgccgcggtaacaaccagccccaccagcccagacgaatggtccctcaccctgacaggtgacccactagccgccgacctggctcccctcggctggcacatccacccccaaaccctctcccccgacctgtacaaccgcatggttgaactactcgccaactccgccgccgcagactacgaacccgccagctggtggaaccacgacgccgacgacgagcccaccaccgaccccaccaacgaggaagaatctaccccgagcaggcgagcccgcccgaatatccgcctgaccaccctgaccggcggcatcgacctatccagcgtcgacatcgacgacatcatcgacgaagccaaccaagccctcgacaacaccgaccagaccaccaaccaggttcgcgtcgacaccgaccaacccggcaccgacacccccttccccatcgacgacatcgacccgctgagctccgaccacccggtcctatccatcatcggccacccccacatcacaggtgccactggaaccgttgggcgctccccgtggcgctgccaacagttggccctctacatcgctgagcatccgggagcatcgggggcgactatcgccgatgatttggggctatcagcgtcgacggtgcgctcgattgctacacacctgcgacactggttgggagccgacgatgccggggtggcttacatgccggcggcgacgcgcggctaccggctcgatgagcggatcgtcacagatgtggacctgatcgacgctgctgtggccggggcaggcattaacaccgctgagacggccacactggtggccattttgaagctgggccgcggacgggtcttcgctggggttcctgactcggaacttcgccagttcagggcgtcgatgtaccacgtggaggcccgcatcgtcgatgctgccctccaagtgacagaccgggccctggaagccggagacttggggctggcccggtgggcgttgacccaagggctactggtgtctcccgatcatgaggacctggtcgccggttgtctgcgcaccgagtaccaggccggcaacatggacaaggtcgccgagctggtcgatcacctgtcggctaccgcacgccgactgggcgtcgacctcaacgaggacaccacccggatcatcgatacggtcacccacgccgacaggagagcatcatgatctcccctgcactcatctccgtcaggaaggttcctatgcaccat

SEQ ID NO: 271 - DNA, 739 bp, Propionibacterium acnes
acgtgcgggtacacctaccagcaggcagcaccagcggggggctataaggtcaccgcaatcacgtcgtgggatgtgacctggtcggtactaggacacacgggcacagtccatatcgagaaggccggtgggcagatgcttccggtcggcgagttggagtctgttgttacacggcgatgactcctgatagtccgacgctgtatgaggtgttgggggtctgccctgatgccactgatgaccagatcaagacggcgtggcgtcgtgccgcgaaagtgactcaccctgatgccggtggcactagtgaggcgttcgcggccgcccggcacgcctgggaggtgttgtctgatcctgcccggcgcaccgcctacgatgccgacctggcgggggaggatgatcccgacgacgaagccgccgacgccttcgacgttgatccgttcacggcatggccctggtgcgccccgtacatcgacgccacccccaccctgcgccacacctgccccggcacgatcaaggccatcgtggtcgccatcgccgggatcatggccggaatcggctggcaggaagcgctggaggccgtggtgtcgccgccggggtttctgggggcgtgctggatagtctcagtgccggttgtcgtcgcagtgacatggctggcagcggtgacgggtctggcatttttcaccatggcggccatctggtgtggatggtcgttgataggtggtgcgttgctgtggggccagacgtc

SEQ ID NO: 272 - DNA, 3863 bp, Propionibacterium acnes
gctgagaaaaattttgggtccgccctgcatatcggggcctcttcataccttcaaaagtgtgaaggggaatacagactcttcgactggaattaaaatggtatatggcgtgtccggtccgcacccagctccacgatgcgccatagaggagccataacttcaccaatcgtatacgatatgagtgtgggtgagcatctaccggtggccgacagtcagatacaagcatgggcggatgaagcagaagctgattatgacctgagcatgcttccgccgtctcgacgtggtcgcccaccggtggggaggggcccgggcactgtggtccctgtgcgcttcgacgcggacactctcaaggcgttgtcacaacgagcccatgacgaaggattgaccacgcgttctgacgcgatccgtgctgcggttaaccagtggctcggcctcggctcgtaaacattatcggcgcgacaaccttactgatgacgctgttggttacgccgtagagcacatcttgtactcgtgggcgctcgacgatgccgatgatcctcgttgctggatgatgattcggtgttgacccagctggcctcctcatggagctagttatcctcatctacgacgatggctatgaactcctgatccacgccatgaaagcccgccctcagtatctgagctacttcgctatctagtgttgttgggcgagttgaactcaacttttctccgacgcaagcgccaataaaaggctgatccatccgaataccaccaaacacggctgaagtgtggaacagattcagcaagacagggtgcggtgctcgggtgcgttggggagatgaggatattcaggcttctggcgggatgtggcttgatgacgtccaggatcaccggttcggttttgaaggtgccttgcattaatgtcgacagggtcgtacgactcgaggactggatcgaccagcccgttgcgtctgaagaacttcatccaccccggtggagctccggccgcgtactggtgcaacggatcattagcatgggtagcgtgagtatgccttcgatcgtggtcagtgctgtcatcatccaagattctgacgggcggcttctcactgtccgtaaacgaggcaccgaggcattcatgctgccaggcggcaagccggagcccggcgaggactcgcgtcaggcagtagtccgggaagtgcacgaagagctcggcgtcgcattgtcttccgacgacctgcgtcgggtgggagtgttcaccacgcgagcagcgaatgaggccggccatcaggtggtggcgacgattttcacccacaccccggttgcggtgagtgagccagctgctgagatcgagcagattcgttggctcgattggagtgtcgacgccctgcctgacgacctggccccgctgctggtcgaggcagtcatcccgtggctgcggcgccgtatccggtcggtcgctgtattcacgggtgcgaaggatggaaccgaccctcattatcgtgtcgaagcaaccgccttgggccggggtctcgcacacgccgggatcaccctggtttatggcggcggggagggcgggatgatgggtgctgttgctgatgcggccctcgctgctggcggcgctgtgatcggagtgatgccgcagcacttggtggacggggagatcgcccatcctagtctgactcacctcgaggtagtgcggactatgcatgagcgcaagcagcggatgagtgacctagctgacgcgttcgtcgcgctacccggcggcggcggaacccttgacgagctattcgaagcatggacatggcagcagctcggtgtacacagcaaacccgtggccttgtacgactcgaccttctgggcaccgctgaccgcgctactcaaccacatgaccatcgaaggcttcatccgccctgaggaccgcgcctcgctcgtgatcgccgataccatacatcagctgatggccgatctcgagggatggaccccaccaccaccgaagtggcgctcgtgacatagaacaaatgattctgactatggctcattgacatctgcgcagcggctactagctccattgacttcaaatcgggccttggccgaggctcggttcaggtggcccggaatggatccccacaaattgaatgctcatgatcgaggtgatgaacgcccactctattgtcctacgcccggttgtatccagcgagcaattgaaggtgctgcgcctgttggtcgaccaggccgagccactcatcatcgacgggcgcatcttgtacgaggcatgggacaggctgcaaacagcccgtccggcccgctagaaaaaatttttagggcccgctccgcacatcccggtctgtacccacaccttcaagggtgtgaagggaataaaaacacacctaacaacaactttgtttcatgatttggcgcgtcggaccctttctgaccgatgtcgtgcgcaacaatggacccatgagttcgcctaccaagacccgccggaaggggacacgcggcccgaaacctcgcagcgacgaggagctaacggctgtgatgttccgcgtcccagagtcagtggccgaacgtgtcagcgatatggcttgggagctgaggctctcccgatccgatcttgtgggctggtcggccctctatgcactcaactcgatgctcagacagcgcggagaggacacgattccggttccggagtatctggacaaggccgtgctcgctgcgttgtatcccgatgggttgcccttcgacgaggacaacgaggagccgggcgagaatgccgggcaggaggagcttgcgatgactggatgagcccgaacatggttgaaggccgccccgccaggcgaccttcaatcaatggtttcggttgtcagctgcagccacccttgccaggtgctgtggttcttctccagaggaggagggaccgccatgaagaccaagaagatctagaagatccaaaagaaccggtttcggctgttgcttcggtcttcatggtagctgatagcccgcgtcgttggaagtgcgacgacgccgatcctcatcggtatcgcaccctgaaacagggtgttgaacatgaagggttgaccgctatgtcaagtcatgagacgccctcccggagggcgtcatgaccgctttaattcaagctctgccgacagctgaactgtctgctggacctggtgctagcagtccagctagaccctctgctgagggcttcatcaagattcatcacgaccttattagtgcgggcgtgtcgggtaacgcgatggcgttgttcgtcgcgttacgtaaccagcccggctgtgatcagtggacccgtcactcgtacctgcggctagcccaatggtgcggctgggatgggctgtcggaggcggcgggctgtaagcgggtgcagcgggccgctgctgagctcgctagcggtggttggctggaatcgcgggtcggccatgatcgtcgcaccgctaagacgctggtgtggcatcggttgaccagccccgacaccgaccgctgggagcaattgccgcggattgtgtgggcgaggatctgccagatcgccggggagacgtcgggagagtgggtgaggcattggctggtgtggcggatgctggccggtcgtactggtgtggctcaggcccctacgtccatcgtggctcggttcctgggctgttcttcgcgccaggtctctcatatccgtggggctctcgttgatgccggtctgctcggctgtgacgaggtctcgggggcggcgagccgggtgtggttcccctcgatggccgaggagtgtgcagcggatcgtgaggtggtcgatggggccgtcgtcggtgctggggtgggctctggtgaaggtgtcgaggagggcggggaacccctgtcgattttgtccacccacccctgtc

SEQ ID NO: 273 - DNA, 2238 bp, Propionibacterium acnes; identical to SEQ ID NO: 215

SEQ ID NO: 274 - DNA, 3865 bp, Propionibacterium acnes
gctgagaaaaattttgggtccgccctgcatatcggggcctcttcataccttcaaaagtgtgaaggggaatacagactcttcgactggaattaaaatggtatatggcgtgtccggtccgcacccagctccacgatgcgccatagaggagccataacttcaccaatcgtatacgatatgagtgtgggtgagcatctaccggtggccgacagtcagatacaagcatgggcggatgaagcagaagctgattatgacctgagcatgcttccgccgtctcgacgtggtcgcccaccggtggggaggggcccgggcactgtggtccctgtgcgcttcgacgcggacactctcaaggcgttgtcacaacgagcccatgacgaaggattgaccacgcgttctgacgcgatccgtgctgcggttaaccagtggctcggcctcggctcgtaaaaattatcggcgcgacaaccttactgatgacgctgttggttacgccgtagagcacatcttgtactcgtgggcgctcgacgatgccgatgatcctcgttgctggatgatgattcggtgttgacccagctggcctcctcatggagctagttatcctcatctacgacgatggctatgaactcctgatccacgccatgaaagcccgccctcagtatctgagctacttcgctatctagtgttgttgggcgagttgaactcaacttttctccgacgcaagcgccaataaaaggctgatccatccgaataccaccaaacacggctgaagtgtggaacagattcagcaagacagggtgcggtgctcgggtgcgttggggagatgaggatattcaggcttctggcgggatgtggcttgatgacgtccaggatcaccggttcggttttgaaggtgccttgcattaatgtcgacagggtcgtacgactcgaggactggatcgaccagcccgttgcgtctgaagaacttcatccaccccggtggagctccggccgcgtactggtgcaacggatcattagcatgggtagcgtgagtatgccttcgatcgtggtcagtgctgtcatcatccaagattctgacgggcggcttctcactgtccgtaaacgaggcaccgaggcattcatgctgccaggcggcaagccggagcccggcgaggactcgcgtcaggcagtagtccgggaagtgcacgaagagctcggcgtcgcattgtcttccgacgacctgcgtcgggtgggagtgttcaccacgcgagcagcgaatgaggccggccatcaggtggtggcgacgattttcacccacaccccggttgcggtgagtgagccagctgctgagatcgagcagattcgttggctcgattggagtgtcgacgccctgcctgacgacctggccccgctgctggtcgaggcagtcatcccgtggctgcggcgccgtatccggtcggtcgctgtattcacgggtgcgaaggatggaaccgaccctcattatcgtgtcgaagcaaccgccttgggccggggtctcgcacacgccgggatcaccctggtttatggcggcggggaggtcgggatgatgggtgctgttgctgatgcggccctcgctgctggcggcgctgtgatcggagtgatgccgcagcacttggtggacggggagatcgcccatcctagtctgactcacctcgaggtagtgcggactatgcatgagcgcaagcagcggatgagtgacctagctgacgcgttcgtcgcgctacccggcggcggcggaacccttgacgagctattcgaagcatggacatggcagcagctcggtgtacacagcaaacccgtggccttgtacgactcgaccttctgggcaccgctgaccgcgctactcaaccacatgaccatcgaaggcttcatccgccctgaggaccgcgcctcgctcgtgatcgccgataccatacatcagctgatggccgatctcgagggatggaccccaccaccaccgaagtggcgctcgtgacatagaacaaatgattctgactatggctcattgacatctgcgcagcggctactagctccattgacttcaaatcgggccttggccgaggctcggttcaggtggcccggaatggatccccacaaattgaatgctcatgatcgaggtgatgaacgcccactctattgtcctacgcccggttgtatccagcgagcaattgaaggtgctgcgcctgttggtcgaccaggccgagccactcatcatcgacgggcgcatcttgtacgaggcatgggacaggctgcaaacagcccgtccggcccgctagaaaaaatttttagggcccgctccgcacatcccggtctgtacccacaccttcaagggtgtgaagggaataaaaacacacctaacaacaactttgtttcatgatttggcgcgtcggaccctttctgaccgatgtcgtgcgcaacaatggacccatgagttcgcctaccaagacccgccggaaggggacacgcggcccgaaacctcgcagcgacgaggagctaacggctgtgatgttccgcgtcccagagtcagtggccgaacgtgtcagcgatatggctttggagctgaggctctcccgatccgatcttgtgggctggtcggccctctatgcactcaactcgatgctcagacagcgcggagaggacacgattccggttccggagtatctggacaaggccgtgctcgctgcgttgtatcccgatgggttgcccttcgacgaggacaacgaggagccgggcgagaatgccgggcaggaggagcttgcgatgactggatgagcccgaacatggttgaaggccgccccgccaggcgaccttcaatcaatggtttcggttgtcagctgcagccacccttgccaggtgctgtggttcttctccagaggaggagggaccgccatgaagaccaagaagatctagaagatccaaaagaaccggtttcggctgttgcttcggtcttcatggtagctgatagcccgcgtcgttggaagtgcgacgacgccgatcctcatcggtatcgcaccctgaaacagggtgttgaacatgaagggttgaccgctatgtcaagtcatgagacgccctcccggagggcgtcatgaccgctttaattcaagctctgccgacagctgaactgtctgctggacctggtgctagcagtccagctagaccctctgctgagggcttcatcaagattcatcacgaccttattagtgcgggcgtgtcgggtaacgcgatggcgttgttcgtcgcgttacgtaaccagcccggctgtgatcagtggacccgtcactcgtacctgcggctagcccaatggtgcggctgggatgggctgtcggaggcggcgggctgtaagcgggtgcagcgggccgctgctgagctcgctagcggtggttggctggaatcgcgggtcggccatgatcgtcgcaccgctaagacgctggtgtggcatcggttgaccagccccgacaccgaccgctgggagcaattgccgcggattgtgtgggcgaggatctgccagatcgccggggagacgtcgggagagtgggtgaggcattggctggtgtggcggatgctggccggtcgtactggtgtggctcaggcccctacgtccatcgtggctcggttcctgggctgttcttcgcgccaggtctctcatatccgtggggctctcgttgatgccggtctgctcggctgtgacgaggtctcgggggcggcgagccgggtgtggttcccctcgatggccgaggagtgtgcagcggatcgtgaggtggtcgatggggccgtcgtcggtgctggggtgggctctggtgaaggtgtcgaggagggcggggaacccctgtcgattttgtccacccacccctgtcga

SEQ ID NO: 275 - DNA, 3865 bp, Propionibacterium acnes
gctgagaaaaattttgggtccgccctgcatatcggggcctcttcataccttcaaaagtgtgaaggggaatacagactcttcgactggaattaaaatggtatatgccgtgtccggtccgcacccagctccacgatgcgccataggggagccataacttcaccaatcgtatacgatatgagtgtgggtgagcatctaccggtggccgacagtcagatacaagcatgggcggatgaagcagaagctgattatgacctcagcatgcttccgccgtctcgacgtggtcgcccaccggtggggaggggcccgggcactgtggtccctgtgcgcttcgacgcggacactctcaaggcgttgtcacaacgagcccatgacgaaggattgaccacgcgttctgacgcgatccgtgctgcggttaaccagtggctcggcctcggctcgtaaacattatcggcgcgacaaccttactgatgacgctgttggttacgccgtagagcacatcttgtactcgtgggcgctcgacgatgctgatgatcctcggtgctggatgatgattcggtgttgacccagctggcctcctcatggagctagttatcctcatctacgacgatggctatgaactcctgatccacgccatgaaagcccgccctcagtatctgagctacttcgctatctagtgttgttgggcgagttgaactcaacttttctccgacgcaagcgccaataaaaggctgatccatccgaataccaccaaacacggctgaagtgtggaacagattcagcaagacagggtgcggtgctcgggtgcgttggggagatgaggatattcaggcttctggcgggatgtggcttgatgacgtccaggatcaccggttcggttttgaaggtgccttgcattaatgtcgacagggtcgtacgactcgaggattggatcgaccagcccgttgcgtctgaagaacttcatccaccccggtggagctccggccgcgtactggtgcaacggatcattagcatgggtagcgtgagtatgccttcgatcgtggtcagtgctgtcatcatccaagattctgacgggcggcttctcactgtccgtaaacgaggcaccgaggcattcatgctgccaggcggcaagccggagcccggcgaggactcgcgtcaggcagtagtccgggaagtgcacgaagagctcggcgtcgcattgtcttccgacgacctgcgtcgggtgggagtgttcaccacgcgagcagcgaatgaggccggccatcaggtggtggcgacgattttcacccacaccccggttgcggtgagtgagccagctgctgagatcgagcagattcgttggctcgattggagtgtcgacgccctgcctgacgacctggccccgctgctggtcgaggcagtcatcccgtggctgcggcgccgtatccggtcggtcgctgtattcacgggtgcgaaggatggaaccgaccctcattatcgtgtcgaagcaaccgccttgggccggggtctcgcacacgccgggatcaccctggtttatggcggcgggaaggtcgggatgatgggtgctgttgctgatgcggccctcgctgctggcggcgctgtgatcggagtgatgccgcagcacttggtggacggggagatcgcccatcctagtctgactcacctcgaggtagtgcggactatgcatgagcgcaagcagcggatgagtgacctagctgacgcgttcgtcgcgctacccggcggcggcggaacccttgacgagctattcgaagcatggacatggcagcagctcggtgtacacagcaaacccgtggccttgtacgactcgaccttctgggcaccgctgaccgcgctactcaaccacatgaccatcgaaggcttcatccgccctgaggaccgcgcctcgctcgtgatcgccgataccatacatcagctgatggccgatcttgagggatggaccccaccaccaccgaagtggcgctcgtgacatagaacaaatgattctgactatggctcattgacatctgcgcagcggctactagctccattgacttcaaatcgggccttggccgaggctcggttcaggtggcccggaatggatccccacaaattgaatgctcatgatcgaggtgatgaacgcccactctattgtcctacgcccggttgtatccagcgagcaattgaaggtgctgcgcctgttggtcgaccaggccgagccactcatcatcgacgggcgcatcttgtacgaggcatgggacaggctgcaaacagcccgtccggcccgctagaaaaaatttttagggcccgctccgcacatcccggtctgtacccacaccttcaagggtgtgaagggaataaaaacacgcctaacaacaactttgtttcatgatttggcgcgtcggaccctttctgaccgatgtcgtgcgcaacaatggacccatgagttcgcctaccaagatgcgccggaagggaacacgcggcccgaaacctcgcagcgacgaggagctaacggctgtgatgtgccgcatcccagagtcagtggccgaacgtgtcagcgatatggcttgggagctgaggctctcccgatccgatcttgtgggctggtcggccctctatgcactcaactcgatgctcagacagcgcggagaggacacgattccggttccggagtatctggacaaggccgtgctcactgcgttgtatcccgatgggttgcccttcgacgaggacaacgaggagccgggcgagaatgccgggcaggaggagcttgcgatgactggatgagcccgaacatggttgaaggccgccccgccaggcgaccttcaatcaatggtttcggttgtcagctgcagccacccttgccaggtgctgtggttcttctccagaggaggagggaccgccatgaagaccaagaagacctagaagatccaaaagaaccggtttcagcttttgcttcggtcttcatggtagctgatagcccgcgtcgttggaagtgcgacgacgccgatcctcatcggtatcgcaccctgaaacagggtgttgaacatgaagggttgaccgctatgtcaagccatgagacgccctcccggagggcgtcatgaccgctttaattcaagctctgccgacagctgaactgtctgctggacctggtgctagcagtccagctagaccctctgctgagggcttcatcaagattcatcacgacctcattagtgcgggcgtgtcggggaacgcgatggcgttgttcgtcgcgttacgtaaccagcccggctgtgatcagtggacccgtcactcgtacctgcggctagcccaatggtgcggctgggatgggctgtcggaggcggcgggctgtaagcgggtgcagcgggccgctgctgagctcgctagcggtggttggctggaatcgcgggtcggccatgatcgtcgcaccgctaagacgctggtgtggcatcggttgaccagccccgacaccgaccgctgggagcaattgccgcggattgtgtgggcgaggatctgccagatcgccggggagacgtcgggagagtgggtgaggcattggctggtgtggcggatgctggccggtcgtactggtgtggctcaggcccctacgaccatcgtggcccggttcctgggctgttcttcgcgccaggtctcccatatccgtggggctctcgttgatgccggtctgctcggctgtgacgaggtgtcgggggcggcgagccgggtgtggttcccctcgatggccgaggagtgtgcagcggatcgtgaggtggtcgatggggccgtcgtcgatgctgaggtgggctctggtgaaggtgtcgaggagggcggggaacccctgtcgattttgtccacccacccctgtcga

SEQ ID NO: 276 - DNA, 2889 bp, Propionibacterium acnes
aggcgagcccgccctagtatccgcctgaccaccctgaccggcggcatcgacctatccagcgtcgacatcgacgacatcatcgacgaagccaaccaggccctcgacaacaccgacgaggccaccgaccaggttcgtgtcgacgccgaccaacccggcaccgacacccccttccccatcgacgacatcgacccgctgagctccgaccatccggtcctatccatcatcggccaccccgacatcacaggtgccactggaaccgttgggcgctccccgtggcgctgccaacagttggctctctacatcgctgagcatccgggagcatcgggggcgactatcgccgatgatttggggctatcagcgtcgacggtgcgctcgattgctacacacctgcgacactggttgggagccgacgatgccggggtggcttacatgccggcggcgacgcgcggctaccggctcgatgagcggatcgtcacagatgtggacttgatcgacgctgctgtggccggggcaggcattaacaccgctgagacggccacactggtggccattttgaagctgggccgcggacgggtcttcgctggggttcctgactcggaacttcgccagttcagggcgtcgatgtaccacgtggaggcccgcatcgtcgatgctgccctccaagtgacagaccgggccctggaagccggggacctggggctggcccggtgggcgttgacccaagggctactggtgtctcccgatcatgaggacctggtcgccggttgtctgcgcaccgagtaccaggccggcaacatggacaaggtatccgaactggtcgatcacctgtcggctaccgcacgacgcctgggcgtcgatttgagcgccgacaccacccggatcatcgactccgttattacccatacacgcaggagagcatcatgatctcttctgcactcagctctgtcaggaaggttcctatgcaccattatcgtcttggtatcggcactgccctcatcgcggtagcagccgtggccggctgtcgctcaacagactcgacacccacaccacctccatcccgtgtctccgccacgacatcagcgagctctaccctcagcccgaccccgtcagccggagcgatcagtgccgccgacgccgaaaacatctaccgcaccgtccaagctaacaagatcgcactgtacaaaaagggtggcctggcacccggggaacccgcacccgcgacactgtcgaactacgccaccggccaggctctcaccgactacatgacctacatgcaccaaatctcggggcagggcatcaaaatcacatcggggaactcctcggttaccgcggtgcgggagaaaaagggtgataccacctaccccgaagccgctatcgccttggaatcgtgcgaagacgacagttcgattcgtaccgtggaccgccacggaaaggctgatcatggacgcattttccatgtcgacagttggtatgcccgcgataagaagggcaccgtcaagatgatcgcattcaactcaacggaggtccccacatgcgacgtcaagtaatcaccgcggccgtactgggcctggccctggccaccacctccctgcccgccctcgcaggcggcggcgacttgaacggcagtgtggacacggatggtcctggttacgatgtgcgtactgaggtggattaccatcacaccaccggtggtgcgggtgggggtgccacgacagggggccatcatgggggcaaaacccacggtgatggtgaaggtgaggctattgatgggcgttctcgcgccgatgccgaagccgaactagacgaagccgaccgtaaccaggacttgacttgtgatgtcttgctcccaccggcgccgaataccccagccggccaggaatgggcgaaagaatgcaatcccccagcgaaaaaggggcagaaggccaccccgaagcccgatccggtgttagtgggccgtcacgcggccttgcagctcacccttcccggcgcggcccctcgtatcgatccgtcccccgaccttaaccggtggcactcggcagcagtgggccaggctttgtggttgtcggttgatgaccccaccgccactacgcagaaatcgatcacgtttatgggccaggttgtctctttgagcgccaaacgtaacggtttgtcgtttgatatgggtgatggtcatgtcgtgcactgtgatgccacgacgacatggacggagtcggtggaaccggggaccccctcacccacgtgcggttacacctaccaacaggcagccccggccgggggctataaggtcaccgcgatcacttcgtgggatgtgacctggtcggtactaggacacacgggcacagtgcatgttgagaaagccggtgggcagatgcttccggtcggcgagttggagtcagttgtcacccgccgatgaaccccgatagccccaccctctacgaggtattgggggttacccccgacgccaccgacacccagctcaagacggcatggcgcactgctgcgaaagcgacccaccccgatgccggcggcgacccccaggcgttcacggccgcccggcacgcctgggaggtgttgtctgatcctgcccggcgcaccgcctacgatgccgacctggcgggggaggatgatcccgacgacgaagccgccgacgccttcgacgttgatccgttcacggcatggccctggtgcgccccgtacatcgacgccacccccaccctgcgccacacctgccccggcacgatcaaggccatcgtggtcgccatcgccgggatcatggccggaatcggctggcaggaagcgctggaggccgtggtgtcgccgccggggtttctgggggcgtgctggatagtctcagtgccggttgtcgtcgcagtgacatggctggcagcg

SEQ ID NO: 277 - DNA, 1224 bp, Propionibacterium acnes
gacgccggccaccccaactactccgacccacacggtgaccccagctccggcctctgccggccactcgaccagcgacgagcacccaatccatacggataccgccacagcggacaaggccagcgacgaggacgccctgtccccaatccaggtgggtttgaccgccagcgtcggactggtgctggtcgccggactgatcaccaccctcaaccgccgctaccggacccggttcacccgccagccccgcggcaaggccatgaccctgcccagcccggacgcccaaactgccgagatagcgctgcgcagcaccggggcgactgacactctgacgatcacctgcctcgaccaggcgctccgcgcgatcggcgcatggtgccaccactgcgggcacccgctgccacccctgctggccgcccgcgtcgatgacgaccggatcgacctgctgctatcccaggcggcccccgaccatcccgaggcggtggagctggccgccgacggatcggtgtggaccctcaccgctgaccggatcgacgacctgctagcccacaccgatgacaaccaagcggctccgtggccgtctctggtcacactgggacgcgacgacgacggcgcccacatcctcatcgacttggaagccgcaggaaccttgcacctgatcgccgatgacgaccaggtcgacgcggccctcgccgcgatcgccgtggaactggccacctgtgactggtccgacgaagtcaacgtcaccctcgtcggccaggtgtgcccgggcctagaagacgcactagagtctccgaccctgacccgcgccaccgacgtcgacgccctcctcaccaccctagaagctcgcgccgacgaccagcgacacatcctcaccgaaggaaaccccctcgccgctcaccgagccgaccccgccatctccgacgggttcgacgccgaagtgatcctcctcgacaccgaactcaccgaagaccaccgcaaccgcctcgccagcctcgtcgaggctcttccccgggtgtcggtggccgcggtaacaaccagccccaccagcccagacgaatggtccctcaccctgacaggtgacccactagccgccgacgtggctcccctcggctggcacatccacccccaaaccctctcccccgacctgtacaaccgcgtggttgaactactcgccaactccgcagccgcagactacgaacccgccgactggtgggaccatgacgccga

SEQ ID NO: 278 - DNA, 3861 bp, Propionibacterium acnes
gctgagaaaaattttgggtccgccctgcatatcggggcctcttcataccttcaaaagtgtgaagggaatacagactcttcgactggaattaaaatggtatatggcgtgtccggtccgcacccagctccacgatgcgccatagaggagccataacttcaccaatcgtatacgatatgagtgtaggtgagcatctaccggtggccgacagtcagatacaagcatgggcggatgaagcagaagctgattatgacctcagcatgcttccgccgtctcgacgtggtcgcccaccggtggggaggggcccgggcactgtggtccctgtgcgcttcgacgcggacactctcaaggcgttgtcacaacgagcccatgacgaaggattgaccacgcgttctgacgcgatccgtgctgcggttaaccagtggctcggcctcggctcgtaaacattatcggcgcgacaaccttactgatgacgctgttggttacgccgtagagcacatcttgtactcgtgggcgctcgacgatgccgatgatcctcgttgctggatgatgattcggtgttgacccagctggcctcctcatggagctagttatcctcatctacgacgatggctatgaactcctgatccacgccatgaaagcccgccctcagtatctgagctacttcgctatctagtgttgttgggcgagttgaactcaacttttctccgacgcaagcgccaataaaaggctgatccatccgaataccaccaaacacggctgaagtgtggaacagattcagcaagacagggtgcggtgctcgggtgcgttggggagatgaggatattcaggcttctggcgggatgtggcttgatgacgtccaggatcaccggttcggttttgaaggtgccttgcattaatgtcgacagggtcgtacgactcgaggattggatcgaccagcccgttgcgtctgaagaacttcatccaccccggtggagctccggccgcgtactggtgcaacggatcattagcatgggtagcgtgagtatgccttcgatcgtggtcagtgctgtcatcatccaagattctgacgggcggcttctcactatccgtaaacgaggcaccgaggcattcatgctgccaggcggcaagccggagcccggcgaggactcgcgtcaggcagtagtccgggaagtgcacgaagagctcggcgtcgcattgtcttccgacgacctgcgtcgggtgggagtgttcaccacgcgagcagcgaatgaggccggccatcaggtggtggcgacgattttcacccacaccccggttgcggtgagtgagccagctgctgagatcgagcagattcgttggctcgattggagtgtcgacgccctgcctgacgacctggccccgctgctggtcgaggcagtcatcccgtggctgcggcgccgtatccggtcggtcgctgtattcacgggtgcgaaggatggaaccgaccctcattatcgtgtcgaagcaaccgccttgggccggggtctcgcacacgccgggatcaccctggtttatggcggcgggaagggcggggtgatgggtgctgttgctgatgcggccctcgctgctggcggcgctgtgatcggagtgatgccgcagcacttggtggacggggagatcgcccatcctagtctgactcacctcgaggtagtgcggactatgcatgagcgcaagcagcggatgagtgacctagctgacgcgttcgtcgcgctacccggcggcggcggaacccttgacgagctattcgaagcatggacatggcagcagctcggtgtacacagcaaacccgtggccttgtacgactcgaccttctgggcaccgctgaccgcgctactcaaccacatgaccatcgaaggcttcatccgccctgaggaccgcgcctcgctcgtgatcgccgataccatacatcagctgatggccgatcttgagggatggaccccaccaccaccgaagtggcgctcgtgacatagaacaaatgattctgactatggctcattgacatctgcgcagcggctactagctccattgacttcaaatcgggccttggccgaggctcggttcaggtggcccggaatggatccccacaaattgaatgctcatgatcgaggtgatgaacgcccactctattgtcctacgcccggttgtatccagcgagcaattgaaggtgctgcgcctgttggtcgaccaggccgagccactcactattgacgggaaagtcctgttcgagacctgggacgggctgcaggcagcccgtcctcacagctgagaaaaaattttggggccgttccgcacatcccggtctgtacccacaccttcaagggtgtgaagggaataaaaacacacctaacaacaactttgtttcatgatttggcgcgtcggaccctttctgaccgatgtcgtgcgcaacaatggacccatgagttcgcctaccaagatgcgccggaagggaacacgcggcccgaaacctcgcagcgacgaggagctaacggctgtgatgtgccgcatcccagagtcagtggccgaacgtgtcagcgatatggcttgggagctgaggctctcccgatccgatcttgtgggctggtcggccctctatgcactcaactcgatgctcagacagcgcggagaggacacgattccggttccggagtatctggacaaggccgtgctcactgcgttgtatcccgatgggttgcccttcgacgaggacaacgaggagccgggcgagaatgccgggcaggaggagcttgcgatgactggatgagcccgaacatggttgaaggccgccccgccaggcgaccttcaatcaatggtttcggttgtcagctgcagccacccttgccaggtgctgtggttcttctccagaggaggagggaccgccatgaagaccaagaagacctagaagatccaaaagaaccggtttcagcttttgcttcggtcttcatggtagctgatagcccgcgtcattggaagtgcgacgacgccgatcctcatcggtatcgcaccctgaaacagggtgttgaacatgaagggttgaccgctatgtcaagccatgagacgccctcccggagggcgtcatgaccgctttaattcaagctctgccgacagctgaactgtctgctggacctggtgctagcagtccagctagaccctctgctgagggcttcatcaagattcatcacgacctcattagtgcgggcgtgtcgggtaacgcgatggcgttgttcgtcgcgttacgtaaccagcccggctgtgatcagtggacccgtcactcgtacctgcggctagcccaatggtgcggctgggatgggctgtcggaggcggcgggctgtaagcgggtgcagcgggccgctgctgagctcgctagcggtggttggctggaatcgcgggtcggccatgatcgtcgcaccgctaagacgctggtgtggcatcggttgaccagccccgacaccgaccgctgggagcaattgccgcggattgtgtgggcgaggatctgccagatcgccggggagacgtcgggagagtgggtgaggcattggctggtgtggcggatgctggccggtcgtactggtgtggctcaggcccctacgtccatcgtggcccggttcctgggctgttcttcgcgccaggtctctcatatccgtggggctctcgttgatgccggtctgctcggctgtgacgaggtgtcgggggcggcgagccgggtgtggttcccctcgatggccgaggagtgtgcagcggatcgtgaggtggtcgatggggccgtcgtcggtgctgaggtgggctctggtgaaggtgtcgaggagggcggggaacccctgtcgattttgtccacccacccctgtc

SEQ ID NO: 279 - DNA, 3714 bp, Propionibacterium acnes
cgattttgtccacccacccctgtcgattttgtccgccaagtattagacaaaccattagacagtgaattagaccctgggtcgcgtcagcgtgttagctcaccaacgcgcgcgcgcgcggcggccgagccgccgaagccaaagaaacccataccaccaacgcctgaaccagcagcccccgcttcagacagtcctgtgtcagcgcacgctgatgaggctgccgagttggcgtggcggttcgtggggtggtgtcctcagctggtaggggcaccgaagaaggtgcgtggccagctccgtcagctggtcgctgccgagatccgccggaatccgggctggctggatgcgccagcgttggaggttgttgcccagcgggtacgtgctgaaggtgcgctgggggtccagcactgcgagattgtgcgagccgagctgcacggggtgatcgccgaccagaaggccgcccccgcccgccccgacgccctgcacgcgcgggagcccaagtggtgggacgacgtgtactacgaaggaaacacaaccgtgtggtacgactctgacgaaaccagtgacgacgacgaggcgtggaaccggtcgcaggtatgtcatgttgctgagcgtgacgacatggctggcgggattgctaccaacctgctggcctcccacgctgatgatccgatggcctggctgactcgccgtcaaaccatgctgatggctcgtttcccccacgcccagaacgaggtcatcgcgatgtgccacatcgtgcgcaccgccctggaggccgacatggccgccggaacccggtgggaggactgatgagggtctcccggcgcgccctcatggccgtggcccgtgccgacgctgccgcagcagaccatgccaccggccgatgggtggccacagccaacgccaccgtcgcccggctgaccggactgtgcgaacgcaccgtccaatacgcccgcgccaccctggtccacctgggcctgtgccgcgtcgtggccaccggccgctacctcaccgccgacgagcggcgcacggctgctcgcacccatggcggccgccagatgcgcgccgcctccacccgcgtcctcaccatgtcctgcgcaatcgtttgcgccctaccccgaaggggtcaccactacaggaaagttaagttcctagatggtcaccaacgcacgcgcaggcgcgtgcgaaggccagcaacaccagagaagaaacccctgtggctgcaaaaactcgcagccctcctcgaccagcacctgccctggctggtgagaaaccatcacatcggccgactgtgccacgccctcaccgccctgggcatcgacgaacactggcaacccgcagacctcgacgccctcctcgacgccatgaaccgcaggaaccgtcgcctcggcctcgacgtgccatgcgccgacgaccagcacaaccccttgggactgttcatccaccaggcccgagacaccctcacccacgacaacccccatgaacgccgcctggcccgcgaacaccaccgcgcccaactcatcgacgaccaactccgccgccgcgcagaaaccgccacctgcgcagcccgcctcgcagccgagcacgccgaccccgactaccagacccgccgtcgtgaacgcagggaaaccctgcgagccacactcagggccgcccagcagcatgtcaggacacactgatacccgctcatacacacaccatgaaacacgacaagccacctgacagtatcagctgcaagacgcatgacaacatagaaggacatgatgaaatacacatagacacaaccccgcacagcagtttcgcaacaaatcatgatagtctcatggcagtatcgcttgatacacacatagcatcactcccacataggcagttatgctgatatactcctactaggttatccgtccaacatgctgagtgggttcctgtacagcatgaaaggagcatggcatgatatgggccgttctcaactgcaagggtggtgtcggcaagacgaccagtgccctcctgctggcggcagccgccgccaagcagggccacaccaccctggtggccgacgctgacccccagggcaccgcatcccagtggtcagccctggcaaccaaaaacgacgaacccctgcccttcccggtgcaagcggtcaacatcgccaccatggaggcactgcccaccaccgacgcccatgatctcatcctcgttgacacacccccctcggcaggcgatctgatgttccaggcatgccgcatcgccgacctcatcatcatccccaccgccacctccggacccgacatctcccgaacatgggtcaccatggacgccacacaaggcacaccacgcgcgatcctcctcacccaaaccgaacacaaccgtgtcgtctaccgccaagctcgcactgccctcgccgccgacgacaccgtcgttctcctggaccacgacatcccccgccgtgaatccatccgcacagcatggggcaccaaccccccagacgacgtcatcacctactacctgcccgtcctcaacgaactcatggaggccctgtcatgaccaccaagaaaaccgacccattcgcccgccagaaagcagcagaagaccgcgcccaccaactccaagacgaagcccaacgccacgcccaccccaaacgcgtcatcggccccaccgcacgattccagttcgtcctgccagccgacgtgctcaccggcctcaaacacctcgccctcacccgcggcaccaccgcccgccaactcaccctcgacgccctcgacaccgcctacggcctcgacaccctcgccaacagcgggaagaaaacccacccatgacccgtgggtccccctgccaccaccccctcgacggcaactgtgtgcgagccacaggcccgcacacaggcggcagcccagtgccgtccccgccaggaaaggaactgaacttttctggagtgctggctccctatcaccccttatggtgctatcagatccagtagcgccagcccgagaggaaacccatgagctacatcgtccgcaccggaaatctagccggcacccccgagctgcgcgaggggtagccgacacggcggaccgtgcccctgacagtaagcggcactactggagacatcaccatgaccgctcagatcctcgccccgtgcaaccagaaggctgccgtcatcgaaggagccctgccatgaaccaacctaccccccacaaggccgacgagtcacagacgagcaacaccacgaggaagtggcggcacaaggtgtcgttctaccaagacccggccgacaccgaccgagtccgcggagcgatcctccacaccatgacaaccgaaggcaaccggaacctgagccagttcgtcaacgatgccgtcatggccaaggtgaccgaactggaagcaaaatacaaccacggcgagccattccccgccgtgggagcccgaggactccccccagggcggcgcagtcgccaacagataagagggcggggaccaccaatagcagtcgatttcggatctagatcgggtagacaggacccatgatgaatttcatatcctccctgctctcggccatcctgaccctctttgcgatggtagccgtggcgataggagtggtgaacattgtgccgggaatatgcgccatcatcggtgcacggaaatacggcgaccaggaccgtgtgcgggcaggacaacgaaagatccttcttggtgctatcgccttggtggtagcagtaggcattc

SEQ ID NO: 280 - DNA, 3907 bp, Propionibacterium acnes
ttggtattggtaggcgatggtgtcaccggttttgttgcggatgacgtcgaagccttcgatgtcggaggggatgtcgtcggcgtcgtagacgacggtggtggtgacggggttggaggccgacatttggccgatggtcacgcgcagcatgtttttcaacgcggaggtgaggattgtcgtggcggtggggttcttgtctgcccagcgtttctcggcgatgtcgatcatgtcttggatggttttgacccatcctcggatgggatcgactttggtcagtttgatccctccaaggaactcgatgggcttagtaacgggcccgtcaggaccgaattcggtgtcccagccttcgtcgatggctagtttcagttcggcggcgtcaacccatgtttcgtgggtggtgccgggcacgttgggccaaaaccatcctgctcgtcctttggtgcgtttgaccggtagtaggccgatgtcgtcccaccaggatggcacggtgaagcggatgtggtagcgggccgggtgccaggggttgttggtgaacaggtcgtgagcttcggtggcgctgagcagagtggcgggtgcggcaccgatctctccggtcactgatccggcatacatgaatcggccgtcgatgtacacgaagttagggatagggccggcaggcacggtggggcgccaaccttgttcgcggtcctcggggttgccgtcgtcgacgcatagttcgtagcggtgctgaggggaggtgtgttggatgagtgcgcccagttcggggtccatcggctccatgcgataggactcgggggtccgtagcttccagaggttgattccttctgctccggggcggtccatgagggcccagtcgcggtcgattctggtggcgatgatgtgggttaattcgcgccatgcccagcgggcctggattggggtgagggtctggccagggaaccattcatcagcgaccagaatgtcgaggttgcggtcggtttctttgtgggtgaaccggcctcgggcgggccgcccggacagcatgaacaggccccgcacgtgccagtcctggttgaactcgcgggtgtgagcgggggtgtcaggcagcagccaggattgaggctggtcggggatgttaccgcagacgatcaggcgtcgggcgttgtggtgtagcgcggttgttagcaggtctgacagggtcgcgtgcttggtgcgccgcccccctagcactggcaggatctcgtttccggccgcgtcgactccccgggcggtgtcgatgtctagccacactgtttcggggtcggggggccgatgtggggcgggacggcgctgctcctggtcgtctctcatggtttcctcctttgggccagggagcggccggcgtcgagggcgttcatgcgctcgcgttgttcttcgcgtagttggtagacccggcctcgtgacactcctgctgcctcggcgatggtggtggccggcaggtggccgatggcggcagcgtcggcaaggacgtcacgccaggccaggtcaatggttcccagctgggctagagcttcgtcgcggcggcgggtggcatcagccactacggaggcccaccctgtggggtggatggtcttgacgacgattcggttgtggcggatggggccccatgcatcagcggggacttgccagccgtgattggcggcggactcggtgatcttgaggcgtcgctcaggtgcgcgggtgcgggcagtgacgtcggtgttccaggtctggactggtacccacgtcccctctcggatgcgttcgatgacgcacgtggtgacctcgtcggtgactgtgatgaccagacgataatctttcccgtctggggtggttcggtagctgggcatgtcaccctcccctatctgtcaaatgagctagacacagtgtctatttaatttgacgcaaagtcaagtgcattagacgcctttgtgtggatccgccccaccagacaaacactcgcgcctcatgacccgccgcgaagccttaacgaaaccaaaccgcttatagaaccgctccgcagcgctccccgagggctttagctccaaggtaagaccttgctcgtcggcccattggcagacttgtgtgaggatctgtgagccgtagccctgatttcggggggcggcatgcacgcacatcagcatgtgaccatgacggcgggtcggcgggctgacataagccccaccacgccagtccggtgtgatctgccaacttcgccatgccgcagcgcgccagcggcgggcctcggtagccaccatgatcaccatgatgatggacagggttacgacgccgactatggtcagctcactccagccaggccagttcccggagatgatccagcctcccagcgcccagatgatcatggcttccacgcccgccgcaatcgggacgagtggggcagtacggatgcggcctgccatgatctcggtgatctcgctgcgatgccatgacaaggagaattcccacgactcttgaatcatgctgatgtgtgaacggcttcctcggcttcgccctgccatagcttctctagacggcgctcggctagctcgtcggggcacggcgacagcctgccgcactcggagcagaccccgaagtggcgcgagagagtgatgaccggctcatcgggagcatgaaccgattcaacgaccgggtgctgctcatcggtgagtcctgaggcgtgaccaatctcggctagacggaggtgaaccataccgtcgtagtagtcgaggccttcaacgtggaacgggtaggagccgtccgcggtgtggcctgcaaccaggtccccgacttccagctgactggcggtcatggttcgcaccggcggcagcggggtccgggtcgcgttgatcctcatggtctctccttgcttctgcgccttcatagatgaaggtgccacagccggggttgatgtgcggaaccacagccactttttcaataaatccatcaccacggtctcaccccttcccaaatgtgtaaaccgtggtttacgctttaaggcatgatcgaacacacaccgacacccgccgcgcctcgcgtggccatcatttcccctagcgggccaccacggttcttggccgagcctcccagcgccgcgctgcgacgccatggtcggacccgcatgaggtcccttcccctatcccctcacattcgcgcctgggtctccaccagcggccgcaaacccaatcccgtgactactgctttgatctggatgcacaccggggccctgcttttggtgtgggacatcgccgttttgaccggccccgccctcggccactgcgtatgccctctcagtaatagcgccgagctgactgcccggcgctggctcgaccaggtcgccgacaatcccggcttcctcaacacccttaccgaggctgcccgcatcaccgatgaatggcgtcacgcaacgcctccgcacattcaagccccttaccggacccttcatcagtgaacggaggtcatgcatgactagcaatattgaatggggccacaatcccgacggccgcgccgaggctcctctttaccgagcctgggccaagatgctcgtgcgcgcctccgggctaccctggcgtatcgtcgccgccctagccgggatctcccctacttccatgcaccaacttctgttcggccgcaacggtcgacccgtggaatggatcggctccgatgatgctcgcgccctgatggatatcggcatcgatgatctcgcctcagcgtccaccgaccgtatcccggcccgcgaatcccgcgagctgttggtagccctgcacaccctcggctggaccgatgagcatctaagccgctggctgaccagttccgacctcgacctgaccaccgcccccaaagccctctacgtcactcgactatccgccgcccgcatccaggccacttacgacctgctcgtcagccaacccgtccg

SEQ ID NO: 281 - DNA, 2174 bp, Propionibacterium acnes
ccccaatgcccccacaacgatcagcacaccaacagcgatcatcaggtgggcagcactaactgatcccaacgaaccaagatcaaacaagccctgcccgggagcgccgagcagtccgtgggcgcgaagccatgctccgagattgccaataatcttggggaccatcttgttcagtagggctatccctccgatgccgacaacgaggaagacgaggatttcttcgcctgcgttgtttcttcctgtgtttgcggtcatgctgccttctcggggtggatggccagccagctgatgaggttgtcggtgatctgccctgagatttggatcagttcgtcttgcccggcctgccatgcccgcgatgtgccggccagcaatgatgctgggacccctactgcgcggccacgggatgcaacctcagccaaggcggcgcgtaactcctcgacggtgctttcgatgtaccaactgccgtcagtactagtctcagcggcatcggtggtagcgataagagcatcggtgaggtcgtcgacggcgcggtccagatcagcgatgtccggtagggctacaggagtcatggtgtgtcttccttctagggtgccttcactggtgaagggtccctagccccggccgatgtgcggtgctgtgggaaaaatgcttcccattggtccgtcttagttaggaaacttggcctaagtgctgtcgagggtcgcgtgttcgtgaccggttcgaagacactgccgccttgccttcttgcccgtggcgcttccgagatggggtcagtgggcgatggctaggccgacgagggcgccgctgcacaggctgggtgcccaggggaggaatcgggtggtgtggtgtcggaaccggtcgattagggcatatagggcgatcagggtgaggccggctatgacagtgacctggatcgtgtcgatgccggttgctgcggccggggctgcccacagtggtgtgatgcgcacgtcggagaagccgaagccgcctcgggagatgagccaggcgatcatccacgccgcggagatgacgacagtagcgatagcagcacgtatcgccgcagtatggtccgagagggcggtaacgactacagccccgatccatccggcccatccggtccacgctaggactgccggtatccatgtggtgatggcgtcaatgacggcaacccatgccccgatggtggctagcagggcccacgtcggccacgtgggtgctggggcccatgctgtggcggtgatcatggtgagtgctgctgcgctacagaccgcgatcaagcttcggaggctgtaggtgtcgcggtaggcgatcttgtcgggattggcggtgggtggttcgggcaggatgtgggtgagggcaggccatcctgcgaccgcaatagccgcgacggcgaccacccacacgatctgttgcatgggtctcatcatggcccatcatcgatgagtatgggtggccgacatggggtcactcgtagaggggatcgaggggtgtgcgggcgagcatggcttcctgtgtgccgagcatgagggtgccagagtcgtcgccggccgattcccagtcgacgatgatctgcccgctgtcgaagctggattcggtgatggtcacccattctccgtcgatattgatgagcaccccagcggccagctctgtggcagcaaccgggtgaggtgggttgtagaagcggtcgatgtcgcgggcagggtcgtcgggttcttcggttacctcgggtggggtcgatctggctgtctcggtgtcgtcggccaggtcggctcccaggatgcgttcccattcggggctggttttcttgcccgctgaggccatcgtctcgtcgatctgttcgtcagtgggccacacaaatttctttttggtccaggtcgtggtgtcgggtcgcagctgatccagcagttccaggtcttgcggggagtgggccttgcgggggtcgggggtgtagaagaattggacttccttaggggctgattcgccggataggtaggtgccgcggccgcgtttgccgaacgggattcccacgccgacgtgttcggagccgaacatcatgcgggctccgtcagcagacaggggtccggtggcggcacgcccggagaagttgtctcggatttcgccgcccaggaactcggcgtcggggcgttgggtccccagatcgacgtggatacggcagg

SEQ ID NO: 282 - DNA, 1677 bp, Propionibacterium acnes
ccccctcttctgggtggtggtccggggcgtcaccgccccggaccagttgggtagtcatctcagttgaaataagcgattagtgatacgcccctcatgctttccggtgctgtcatgagcgtctgacaacagcgacacctcggggcagccgacggacagtcctctggctgccgctctgatcccatgcccacggcacgaaggtgtcggacagctcggtctcgtcatgtgcccaaatagcgtcgtgggcctgtcgccaagcttctcgggagccccacacgggcacgaccgggccacaccggtgtcctggtctccagtgtcgcgacactgtcgatttcggtacgtgcaatgcggcggcggtttgacggatcgacatcccagactcccgcgcgtcccagatcgccatgtggagagtatttgcctccagtgcggccgccacacttgcacgctctcgcgcacgctcgaatgcccgcctagtgctctcaaatgtcgtcacgacgcctccccctgaaaatactcagggtgtcccacggtgggacaccctgagtatttcataccccaactcgcctcaccacacgtcgacctcgacaccgatcaagcgacccgtatcagcgacattgccgtaccgctgccccgcctggtcctccagccacgacaacgcatcccgaaacagcccgacgtcttccaaagctaaaccacagtcgtagccgcccttgtcccccaaccgcacaatctggcgctcccggtggcctccctcgtcgacctcgatccacagtttcgcgtgcatccgctggcctcggccctctgacaggatctcggtgagcaggtcggacgcctgccctcgcgcatcctcgttactgcgggggaattggagtatgtgggaggaacggtggtggggcaggtttgtgacctcgtgacgcagcaggttgcgcttgtgcatctgccgttcgagacgctcgggctgacctgttgacggggttgagccgtggcgccgcttcctcggcggggtctcgatccgttgctcttccggcggttcggcgtcaggttgtggtgcgcgatctcccctaggacgggggggctcgccacctatatccgagggacgatgagacggccttccacgcttgctgcgcactttcgcagcccgccccttgcggtcacatcgacgcggcggcggagtgacgtcctcaccgcgcgctaactgcgtcaacgccgccaccaggttggtgcccggtttcagccctttcagcacgaaccgcaccaggcgggggtctcggccgattcgtcgggcaatctcggcttggctccacccttcggctaacagggtgcgcaacaagtcttgggcccggttatcacgctcagtcactggtcgcctcctcggggagtcctgcctgctcggcctgctctgatagagcagcccgttccgatccggtctggggcgctttcaggggaccgggtaggacacctttgacacgcagtcgcccgtccttgccgtcgtcgccgcccccctgggccacagggagcgcccgggggggcacgttgctggtgtagatggcgtcgccgtggatagccagcagggtgcgggagttcatgcgtagtgctcctcccttggttgtggcgttttttccggtggtggggtcggcgatgggtgtgttgagggtgcgtacgcgggacagggcccagata

SEQ ID NO: 283 - DNA, 3558 bp, Propionibacterium acnes
aaccgtcatctggcgtggagtagcgagctgatgcaggaaggcaatttgtacggccttcccgaggaagacccgttgtggggcgaggccgtggagctggtagcgggacttatcccctctgtgcgggcgatgtggtcgcacgatgggcagaccgtgactgtgtcggctggccggcgggtggcgacactggggatgccgatgcggggatggcgtggtatcgagatgcgcggctggaatccagtgggcgccgatacgtggtggatcgttgaccaggtgggtagttggctggtcgatcaggatgagccgatggtcgttgacgggagggtgctccatgaggcgtgggaacggtcgcagatggtccgttcaggccgctgagaaaaaatttaggtccgccctgcatatcggggcctcttcataccttcaaaagtgtgaagggaatacagactcttcgactggaattaaaatggtatatggcgtgtccggtccgcacccagctccacgatgcgccataggggagccataacttcaccaatcgtatacgatatgagtgtaggtgagcatctaccggtggccgacagtcagatacaagcatgggcggatgaagcagaagctgattatgacctcagcatgcttccgccgtctcgacgtggtcgcccaccggtggggaggggcccgggcactgtggtccctgtgcgcttcgacgcggacactctcaaggcgttgtcacaacgagcccctgacgaaggattgaccacgcgttctgacgcgatccgtgctgcggttaaccagtggctcggcctcggctcgtaaacattatcggcgcgacaaccttactgatgacgctgttggttacgccgtagagcacatcttgtactcgtgggcgctcgacgatgctgatgatcctcgttgctggatgatgattcggtgttgacccagctggcctcctcatggagctagttatcctcatctacgacgatggctatgaactcctgatccacgccatgaaagcccgccctcagtatctgagctacttcgctatctagtgttgttgggcgagttgaactcaacttttctccgacgcaagcgccaataaaaggctgatccatccgaataccaccaaacacggctgacgtgtggaacagattcagcaagacagggtgcggtgctcgggtgcgttggggagatgaggatattcaggcttctggcgggatgtggcttgatgacgtccaggatcaccggttcggttttgaaggtgccttgcattaatgtcgacagggtcgtacgactcgaggactggatcgaccagcccgttgcgtctgaagaacttcatccaccccggtggagctccggccgcgtactggtgcaacggatcattagcatgggtagcgtgagtatgccttcgatcgtggtcagtgctgtcatcatccaaggttctgacgggcggcttctcactgtccgtaaacgaggcaccgaggcattcatgctgccaggcggcaagccggagcccggcgaggactcgcgtcaggcagtagtccgggaagtgcacgaagagctcggcgtcgcattgtcttccgacgacctgcgtcgggtgggagtgttcaccacgcgagcagcgaatgaggccggccatcaggtggtggcgacgattttcacccacaccccggttgcggtgagtgagccagctgctgagatcgagcagattcgttggctcgattggagtgtcgacgccctgcctgatgacctggccccgctgctggtcgaggcagtcatcccgtggctgcggcgccgtatccggtcggtcgctgtattcacgggtgcgaaggatggaaccgaccctcattatcgtgtcgaagcaaccgccttgggccggggtctcgcacacgccgggatcaccctggtttatggcggcgggaaggtcgggatgatgggtgctgttgctgatgcggccctcgctgctggcggcgctgtgatcggagtgatgccgcagcacttggtggacggggagatcgcccatcctagtctgactcacctcgaggtagtgcggactatgcatgagcgcaagcagcggatgagtgacctagctgacgcgttcgtcgcgctacccggcggcggcggaacccttgacgagctattcgaagcatggacatggcagcagctcggtgtacacagcaaacccgtggccttgtacgactcgaccttctgggcaccgctgaccgcgctactcaaccacatgaccatcgaaggcttcatccgccctgaggaccgcgcctcgctcgtgatcgccgataccatacatcagctgatggccgatcttgagggatggaccccaccaccaccgaagtggcgctcgtgacatagaacaaatgattctgactatggctcattgacatctgcgcagcggctactagctccattgacttcaaatcgggccttggccgaggctcggttcaggtggcccggaatggatccccacaaattgaatgctcatgatcgaggtgatgaacgcccactctattgtcctacgcccggttgtatccagcgagcaattgaaggtgctgcgcctgttggtcgaccaggccgagccactcatcatcgacgggcgcatcttgtacgaggcatgggacaggctgcaaacagcccgtccggcccgctagaaaaaatttttagggcccgctccgcacatcccggtctgtacccacaccttcaagggtgtgaagggaataaaaacacacctaacaacaactttgtttcatgatttggcgcgtcggaccctttctgaccgatgtcgtgcgcaacaatggacccatgagttcgcctaccaagatgcgccggaaggggacacgcggcccgaaacctcgcagcgacgaggagctaacggctgtgatgttccgcgtcccagagtcagtggccgaacgtgtcagcgatatggcttgggagctgaggctctcccgatccgatcttgtgggctggtcggccctctatgcactcaactcgatgctcagacagcgcggagaggacacgattccggttccggagtatctggacaaggccgtgctcgctgcgttgtatcccgatgggttgcccttcgacgaggacaccgaggagccgggcgagaatgccgggcaggaggagcttgcgatgactggatgagcccgaacatggttgaaggccgccccgccaggcgaccttcaatcaatggtttcggttgtcagctgcagccacccttgccaggtgctgtggttcttctccagaggaggagggaccgccatgaagacccagaagacctagaagatccaaaagaaccggtttcggctgttgcttcggtcttcatggtagctgatagcccgcgtcgttggaagtgcgacgacgccgatcctcatcggtatcgcaccctgttccagggtcgagaatgtgaaggattaacaaccatgacaagtcatgagacgccctcccggagggcgtcatgaccgctttaattcaagctctgccgacagctgaactgtctgctggacctggtgctagcagtccagctagaccctctgctgagggcttcatcaagat

SEQ ID NO: 284 - DNA, 3282 bp, Propionibacterium acnes
gagccagttatcctcatctacgacgatggctatgaactcctgatccacgccatgaaagcccgccctcagtatctgagctacttcgctatctagtgttgttgggcgagttgaactcaacttttctccgacgcaagcgccaataaaaggctgatccatccgaataccaccaaacacggctgaagtgtggaacagattcagcaagacagggtgcggtgctcgggtgcgttggggagatgaggatattcaggcttctggcgggatgtggcttgatgacgtccaggatcaccggttcggttttgaaggtgccttgcattaatgtcgacagggtcgtacgactcgaggattggatcgaccagcccgttgcgtctgaagaacttcatccaccccggtggagctccggccgcgtactggtgcaacggatcattagcatgggtagcgtgagtatgccttcgatcgtggtcagtgctgtcatcatccaagattctgacgggcggcttctcactgtccgtaaacgaggcgccgaggcattcatgctgccaggcggcaagccggagcccggcgaggactcgcgtcaggcagtagtccgggaagtgcacgaagagctcggcgtcgcattgtcttccgacgacctgcgtcgggtgggagtgttcaccacgcgagcagcgaatgaggccggccatcaggtggtggcgacgattttcacccacaccccggttgcggtgagtgagccagctgctgagatcgagcagattcgttggctcgattggagtgtcgacgccctgcctgatgacctggccccgctgctggtcgaggcagtcatcccgtggctgcggcgccgtatccggtcggtcgctgtattcacgggtgcgaaggatggaaccgaccctcattatcgtgtcgaagcaaccgccttgggccggggtctcgcacacgccgggatcaccctggtttatggcggcgggaaggtcggggtgatgggtgctgttgctgatgcggccctcgctgctggcggcgctgtgatcggagtgatgccgcagcacttggtggacggggagatcgcccatcctagtctgactcacctcgaggtagtgcggactatgcatgagcgcaagcagcggatgagtgacctagctgacgcgttcgtcgcgctacccggcggcggcggaacccttgacgagctattcgaagcatggacatggcagcagctcggtgtacacagcaaacccgtggccttgtacgactcgaccttctgggcaccgctgaccgcgctactcaaccacatgaccatcgaaggcttcatccgccctgaggaccgcgcctcgctcgtgatcgccgataccatacatcagctgatggccgatcttgagggatggaccccaccaccaccgaagtggcgctcgtgacatagaacaaatgattctgactatggctcattgacatctgcgcagcggctactagctccattgacttcaaatcgggccttggccgaggctcggttcaggtggcccggaatggatccccacaaattgaatgctcatgatcgaggtgatgaacgcccactctattgtcctacgcccggttgtatccagcgagcaattgaaggtgctgcgcctgttggtcgaccaggccgagccactcatcatcgacgggcgcatcttgtacgaggcatgggacaggctgcaaacagcccgtccggcccgctagaaaaaatttttagggcccgctccgcacatcccggtctgtacccacaccttcaagggtgtgaagggaataaaaacacacctaacaacaactttgtttcatgatttggcgcgtcggaccctttctgaccgatgtcgtgcgcaacaatggacccatgagttcgcctaccaagacccgccggaaggggacacgcggcccgaaacctcgcagcgacgaggagctaacggctgtgatgttccgcgtcccagagtcagtggccgaacgtgtcagcgatatggcttgggagctgaggctctcccgatccgatcttgtgggctggtcggccctctatgcactcaactcgatgctcagacagcgcggagaggacacgattccggttccggagtatctggacaaggccgtgctcgctgcgttgtatcccgatgggttgcccttcgacgaggacaacgaggagccgggcgagaatgccgggcaggaggagcttgcgatgactggatgagcccgaacatggttgaaggccgccccgccaggcgaccttcaatcaatggtttcggttgtcagctgcagccacccttgccaggtgctgtggttcttctccagaggaggagggaccgccatgaagaccaagaagacctagaagatccaaaagaaccggtttcggctgttgcttcggtcttcatggtagctgatagcccgcgtcgttggaagtgcgacgacgccgatcctcatcggtatcgcaccctgaaacagggtgttgaacatgaagggttgaccgctatgtcaagccatgagacgccctcccggagggcgtcatgaccgctttaattcaagctctgccgacagctgaactgtctgctggacctggtgctagcagtccagctagaccctctgctgagggcttcatcaagattcatcacgacctcattagtgcgggcgtgtcgggtaacgcgatggcgttgttcgtcgcgttacgtaaccagcccggctgtgatcagtggacccgtcactcgtacctgcggctagcccaatggtgcggctgggatgggctgtcggaggcggcgggctgtaagcgggtgcagcgggccgctgctgagctcgctagcggtggttggctggaatcgcgggtcggccatgatcgtcgcaccgctaagacgctggtgtggcatcggttgaccagccccgacaccgaccgctgggagcaattgccgcggattgtgtgggcgaggatctgccagatcgccggagagacgtcgggagagtgggtgaggcattggctggtgtggcggatgctggccggtcgtactggtgtggctcaggcccctacgaccatcgtggcccggttcctgggctgttcttcgcgccaggtctcccatatccgtggggctctcgttgatgccggtctgctcggctgtgacgaggtgtcgggggcggcgagccgggtgtggttcccctcgatggccgaggagtgtgcagcggatcgtgaggtggtcgatggggccgtcgtcgatgctgaggtgggctctggtgaaggtgtcgaggagggcggggaacccctgtcgattttgtccacccacccctgtc

SEQ ID NO: 285 - DNA, 3093 bp, Propionibacterium acnes
gtcgagaatggccttgaggacgagggcttggattgtggtgtcattctgggctgccttgaccttcagtccaacgccgatgtcccgggggattctggtctgcaacttgaacaggtctgcctccttggttttgaacagtttggttgcagggttggcaacgggctgttcttggcgctggcgtccaaggttgcttttctttcgggcggtcatgacatcatctccaacagttcgtcggcaacatcggcgaagaaggcgatagtttccggctcaggggtacagccgtaggcgcgcttgatgacttgacgcttggggatgacgtgatcgaccaactgcgtctgggagtcgttggctagaaggtcgcgaccttccttgaacagggaggtattcggttcagctttggaaagcagcaccacgcgcggggttcctgcggcggcgtcgtgcgtctcccaggtgcgcgccatgtcgagcccggacgtgtcggtggggatgataaccagatcggcggcgcgaatggcggcggtgatgatgtcaccgttgcccggcggggtgtcaatgatgacaacttcttcgggtccggcgacgaggtgctggagcgtcgccttgttggccggttccacggggaaccccaaggggtcggcgttactcagtgtgcactcggcccaggatgatgctgacccttgagggtcggcatctttgacgcggaccatacggcccgtctcatggagagctgcagccagcaggatcgctgccgtggtcttaccgacgccacccttggcgttgataatgctccagatcatggtgacacctttcagtgaggatgcatatcagtttacctgcaaggagtaaagacggcaagcagttatgccgtttctgcggcaagccgtcttgcatccttggatgtatagatagttgtctacttatggttgtggatcgtggtgtctcgtaccaggatttagtgtgctcgctgatatgcacgactttcgggcggcctgatctggcggtggtgccactaacccaggagtctgatccgcaaggtgtcctcgactttgaggaaggggtctctgctttcgtgttgacctaaagtcaacggccctgggcgatcactgaatcctaatatctttgtatccttccctgattgcatcttagcatccttgaattcaaacagggatggagccatgctgttttgacgacatggatgcactggggtttggttgttgccgatgcggagcgtcaggcggcccgggacgccgccaccgccgacacgctgcgggagatcgtgggactgctgggccggggcggcgaggtcccgcccgccaagacggggcgtaagacgaccggcaggccggccccggcccgcaagtcgtcggccacgcagtaaaggcagggatccgtccctacgcagagagcggaggcagatcctgggggatccgactcttcggttccgtgatcttcccggagatcttcccggatcccccagggctcatcctgatacggggtccgccgacggaccccgtatcagtgggggcgctgccaccagtgatggcgggcgggtcggtcggcgtctaggccccgcccgatggtcgcctggtctacctcgcaggcccgtgctgttgccgaggccgagaacgtctgcccacttgttgccgattcagtcccctctccgtctgccatgtcgccaacctttcctatctggcgtgctcatggacatgcccgggcacgccctcgctgctcagaggcctgctcgttccacctctggccgcgaaccgtatttctgctgaccactcctcgtgcgtgaatatttgccagccttggccattcatatttggactactctgcaccagatatcggactgggaaacctcttgcacatctctaattgtcatctattcgttgggcgcgcgctgttagatcgtgatcataccaatcagaagacaaagcgacgcccttttgagcggcttttcgaacgattctagaccgcgctatatcagcatttctaccgcgcggccagagtgctacactaaattcctctctgcaatccttaagtccattctttacttcctcatccaatttctgcgacagcatttttatggaagcatcgcactctgactcatcatcaaatgcctcaattgcgtgcgttcgccattcacggcgcgtattatcgtagccgtaatgaagtattacccaccgatccacagaatcatcgttaggatctacaactgtcatgaatggcccaactctcgcgctggtgtattctcaattgcagttcagtgactttacttgaccagtcccggatttagtagacgtagacggagagtaccccgccgggaacttgactgacatcactgctgtaccgtactgctttcccgggtggcaaccatcgtaagcagcatttgccgtgacgtacctagtgctctttctctgagtgccggtaatcgccttatatggtacaggtgggtgaatcgtagccgttacggataccgatgacacgtttgcatcacatgaagctgtggcgacataattagttgtcccattgacatgatgagagtcgtggacatactgtcgaggatcgagagtgcaggttattgttgacgccgttgttctggtaccagctgctttcgagctctttgttgcagttacagtctgcggccctgaaggttttactgacgcgactgatgtgttcgcgtgttttgcggcagtgctttgatttggttgtgcttgtgtagcagttgctgatgtcgccagtgatgcccccattaccatagctgtgattatggcgtagtctttacgcttcattgcgcccccaaataagcatgttagtttgctattttgaataggatacgagacatcgccatgacttgtcaagggaagaagtaaaaagaatcgggggggtatcaagaaagatgtgctttcatcaggacgaaagcggatgggtccgttcgacttggtgacgaatgatccggccttgcgtcgcggagaccaggccggcgagtttgtcgagcagggccgccgtggcctcatcgtcgggcacatcactaaagggacgaacaaccatgacggctagggccagaaacgaccggaactgaatcgcatgtggacc

SEQ ID NO: 286 - DNA, 2920 bp, Propionibacterium acnes
acccttccagcccagcaccacccactacaccgacacgatccacgaagctgaaaccgaacctcccatccccgtccgaaacatcaacgaactcatcaaccccaccaaccatgcatgaacgcacgatcgcctaccggccagccttcctgcgcgacgtgaagcggctcaaaaacaagcactacaacatgaacacacactcaaatgggcggtaaggtcacgaagtcgacgtggctgcctcacggatggcttcggcgagctcttggggtcgactccacatgggccagtggccggttggcagatccatcgcggtgaagttggtcaggtgcgcgacggcgctgaacatcggattgcctgctgcggccagctcgaggacctggacgctgggaatggagcagcagatcaacgtggttagtacatcatggcgagcgctattggacagcgcgacccgtgcccgggccacttgcgcgggttcaggaaccgcccgtgcccggaaccggtcaaggtgctcgttgctgaggccctctaaactggcctgcttgccgagagtatcgaagtcaggaagtggcagctcagctgtttcctcaggtagatctggtgcgaaggcacctccatcgctcatgggaccggagtccacccagacgatccgatggaccaactctgggtgcctgtctacaactaggctcaccggcccgttcgcgccactgtgtcccaccaggaccgcatcgccgcccatctcgtccaggatggctgagatggcgtcagcttggtcgtcgagcgtgcgcgtagtgcgctgggtgtcctccggatcgagacctggcagcgtcagccccacggctcgactgccagcagtgttcaataactcgactacctcgtcccaagcccaggctccgagccagtaaccaggaacgaggacgataggccgatgctggtcaggtcgcgatgttgaagtcatggagacatagttgcacagtgcgcggacaagggagtggcactatttctggcatgaatttagatctgggtgtccggtgaggcgatcagaacgcctccatgtactgtccgagtgtctaggatgcagcggacacagtcgagcagctggctcacaagtttccaggtgtccttctgcccctatgagggaagtcggctgctctcgcaacctttgagggctgctctggggtcggaaccagttacagatcgttcaagttccgggaactaccgccggtcacgctgattgattcccgggcgatctcgcttctgacgacagtggtcggtgaccgagaggagtcctactctgaccccgctgctgcggtgagtaaatcacgggcgtcccggatccggccacccgtccaagtgccagccagcttgatcggctaggcatcgtcaaggagcgacgatgaggtgatgatgcgatgtgagcgcaccgcgaagtgaggtataaagaagccttcccgggcgcatgcgtcgcccaggaaggccaggttggcccctggacggctgaatggttgggcggatcaggctgtagcggagacgtgcagtacctcgtaggcgatggcgttggttgggctctggtctgcatcgtggctactgagttcgacgaggatgacggtccaggtggtgatgtcgacggcggtgacgcgggcgatggtggaatcagtggatgctgcaaggaagtcggcggttatgtcttcgatgcagtgggacggagcagtgctggtgggcaggggcacggtcttgacggtcaggcttcgggcagcagagtaatcggcggttccgttaacaagctggtggacggtccagtcctggatcgggtgccggccgaagtcgcgtacgatagccgagtaaccaagttcgccccagcagaactggcgcatcccctctatgtcgcgccagacgtagaagggcgcgtaggagttctggggtgcgcctttgaccttttcttggatgaggtaggccttgaactccagtccatggtagccgtccatgaggtgtccagtctggatgacgcggtcgcggatgatctgcatgtcatagtcggtgggcagggtgatctgatattgcatggcgtacatcagcggttctccttggtttcgtgggagtaggtcgtgggggtgacgggttcctgccaatcgatggttgacaagtcgtcggcggcttgttggtaggtaaggtggatcattggctgtttgagtgcagcgccatgccagtgtctctggccggcgtcgatccagatggattcgcccttggtcaggtgctggggtgcttgtccttcaatatggaccagggcaacgccgcccgtgacgtagaggccctgtcccttggggtgtgtgtgcctcagcggcaaacgtgacggcgtgggcggcacgcccggcgtcttccgtggcacgatcggccggatccatggcggcgcgcagctgctgttctgcagccaggcgtccaggtcacggcgggcagcatcgacacccagggcagcctcgacggcttcagggctacgacgctggccgggctggttgaccgcagaccactggtgccgggcgtcgtccagatcatggccggcggcgtcgatgagggcggtggtggcttcggcgcagcatcgcctgatccactccgaacgtgacaggccagctgtctcggcggcactgtcaatgcgcgccaggagagatttcatgggcgctcatctgtagcctccagataggcgttgatgtagcgcagagcctgatccgtcatgtcgatggcggctgcctcggcagacgacacaacgggctgtggatgataagaccacccaacatagacggcgaacatcaatttctcgacagctttcatgaggtccccggcggcaaccgcatccgcctcatcatccgaggagaaccacttcaggtctgaacggctgtacatagcccctaggtcctgatgtgggtcgaggtccttg

SEQ ID NO: 287 - DNA, 2918 bp, Propionibacterium acnes
acccttccagcccagcaccacccactacaccgacacgatccacgaagctgaaaccgaacctcccatccccgtccgaaacatcaacgaactcatcaaccccaccaaccatgcatgaacgcacgatcgcctaccggccagccttcctgcgcgacgtgaagcggctcaaaaacaagcactacaacatgaacacacactcaaatgggcggtaaggtcacgaagtcgacgtggctgcctcacggatggcttcggcgagctcttggggtcgactccacatgggccagtggccggttggcagatccatcgcggtgaagttggtcaggtgcgcgacggcgctgaacatcggattgcctgctgcggccagctcgaggacctggacgctgggaatggagcagcagatcaacgtggttagtacatcatggcgagcgctattggacagcgcgacccgtgcccgggccacttgcgcgggttcaggaaccgcccgtgcccggaaccggtcaaggtgctcgttgctgaggccctctaaactggcctgcttgccgagagtatcgaagtcaggaagtggcagctcagctgtttcctcaggtagatctggtgcgaaggcacctccatcgctcatgggaccggagtccacccagacgatccgatggaccaactctgggtgcctgtctacaactaggctcaccggcccgttcgcgccactgtgtcccaccaggaccgcatcgccgcccatctcgtccaggatggctgagatggcgtcagcttggtcgtcgagcgtgcgcgtagtgcgctgggtgtcctccggatcgagacctggcagcgtcagccccacggctcgactgccagcagtgttcaataactcgactacctcgtcccaagcccaggctccgagccagtaaccaggaacgaggacgataggccgatgctggtcaggtcgcgatgttgaagtcatggagacatagttgcacagtgcgcggacaagggagtggcactatttctggcatgaatttagatctgggtgtccggtgaggcgatcagaacgcctccatgtactgtccgagtgtctaggatgcagcggacacagtcgagcagctggctcacaagtttccaggtgtccttctgcccctatgagggaagtcggctgctctcgcaacctttgagggctgctctggggtcggaaccagttacagatcgttcaagttccgggaactaccgccggtcacgctgattgattcccgggcgatctcgcttctgacgacagtggtcggtgaccgagaggagtcctactctgaccccgctgctgcggtgagtaaatcacgggcgtcccggatccggccacccgtccaagtgccagccagcttgatcggctaggcatcgtcaaggagcgacgatgaggtgatgatgcgatgtgagcgcaccgcgaagtgaggtataaagaagccttcccgggcgcatgcgtcgcccaggaaggccaggttggcccctggacggctgaatggttgggcggatcaggctgtagcggagacgtgcagtacctcgtaggcgatggcgttggttgggctctggtctgcatcgtggctactgagttcgacgaggatgacggtccaggtggtgatgtcgacggcggtgacgcgggcgatggtggaatcagtggatgctgcaaggaagtcggcggttatgtcttcgatgcagtgggacggagcagtgctggtgggcaggggcacggtcttgacggtcaggcttcgggcagcagagtaatcggcggttccgttaacaagctggtggacggtccagtcctggatcgggtgccggccgaagtcgcgtacgatagccgagtaaccaagttcgccccagcagaactggcgcatcccctctatgtcgcgccagacgtagaagggcgcgtaggagttctggggtgcgcctttgaccttttcttggatgaggtaggccttgaactccagtccatggtagccgtccatgaggtgtccagtctggatgacgcggtcgcggatgatctgcatgtcatagtcggtgggcagggtgatctgatattgcatggcgtacatcagcggttctccttggtttcgtgggagtaggtcgtgggggtgacgggttcctgccaatcgatggttgacaagtcgtcggcggcttgttggtaggtaaggtggatcattggctgtttgagtgcagcgccatgccagtgtctctggccggcgtcgatccagatggattcgcccttggtcaggtgctggggtgcttgtccttcaatatggaccagggcaacgccgcccgtgacgtagaggccctgtcccttggggtgtgtgtgcctcagcggcaaacgtgacggcgtgggcggcacgcccggcgtcttccgtggcacgatcggccggatccatggcggcgcgcagctgctgttctgcagccaggcgtccaggtcacggcgggcagcatcgacacccagggcagcctcgacggcttcagggctacgacgctggccgggctggttgaccgcagaccactggtgccgggcgtcgtccagatcatggccggcggcgtcgatgagggcggtggtggcttcggcgcagcatcgcctgatccactccgaacgtgacaggccagctgtctcggcggcactgtcaatgcgcgccaggagagatttcatgggcgctcatctgtagcctccagataggcgttgatgtagcgcagagcctgatccgtcatgtcgatggcggctgcctcggcagacgacacaacgggctgtggatgataagaccacccaacatagacggcgaacatcaatttctcgacagctttcatgaggtccccggcggcaaccgcatccgcctcatcatccgaggagaaccacttcaggtctgaacggctgtacatagcccctaggtcctgatgtgggtcgaggtcct

SEQ ID NO: 288 - DNA, 2920 bp, Propionibacterium acnes
acccttccagcccagcaccacccactacaccgacacgatccacgaagctgaaaccgaacctcccatccccgtccgaaacatcaacgaactcatcaaccccaccaaccatgcatgaacgcacgatcgcctaccggccagccttcctgcgcgacgtgaagcggctcaaaaacaagcactacaacatgaacacacactcaaatgggcggtaaggtcacgaagtcgacgtggctgcctcacggatggcttcggcgagctcttggggtcgactccacatgggccagtggccggttggcagatccatcgcggtgaagttggtcaggtgcgcgacggcgctgaacatcggattgcctgctgcggccagctcgaggacctggacgctgggaatggagcagcagatcaacgtggttagtacatcatggcgagcgctattggacagcgcgacccgtgcccgggccacttgcgcgggttcaggaaccgcccgtgcccggaaccggtcaaggtgctcgttgctgaggccctctaaactggcctgcttgccgagagtatcgaagtcaggaagtggcagctcagctgtttcctcaggtagatctggtgcgaaggcacctccatcgctcatgggaccggagtccacccagacgatccgatggaccaactctgggtgcctgtctacaactaggctcaccggcccgttcgcgccactgtgtcccaccaggaccgcatcgccgcccatctcgtccaggatggctgagatggcgtcagcttggtcgtcgagcgtgcgcgtagtgcgctgggtgtcctccggatcgagacctggcagcgtcagccccacggctcgactgccagcagtgttcaataactcgactacctcgtcccaagcccaggctccgagccagtaaccaggaacgaggacgataggccgatgctggtcaggtcgcgatgttgaagtcatggagacatagttgcacagtgcgcggacgagggagtggcactatttctggcatgaatttagatctgggtgtccggtgaggcgatcagaacgcctccatgtactgtccgagtgtctaggatgcagcggacacagtcgagcagctggctcacaagtttccaggtgtccttctgcccctatgagggaagtcggctgctctcgcaacctttgagggctgctctggggtcggaaccagttacagatcgttcaagttccgggaactaccgccggtcacgctgattgattcccgggcgatctcgcttctgacgacagtggtcggtgaccgagaggagtcctactctgaccccgctgctgcggtgagtaaatcacgggcgtcccggatccggccacccgtccaagtgccagccagcttgatcggctaggcatcgtcaaggagcgacgatgaggtgatgatgcgatgtgagcgcaccgcgaagtgaggtataaagaagccttcccgggcgcatgcgtcgcccaggaaggccaggttggcccctggacggctgaatggttgggcggatcaggctgtagcggagacgtgcagtacctcgtaggcgatggcgttggttgggctctggtctgcatcgtggctactgagttcgacgaggatgacggtccaggtggtgatgtcgacggcggtgacgcgggcgatggtggaatcagtggatgctgcaaggaagtcggcggttatgtcttcgatgcagtgggacggagcagtgctggtgggcaggggcacggtcttgacggtcaggcttcgggcagcagagtaatcggcggttccgttaacaagctggtggacggtccagtcctggatcgggtgccggccgaagtcgcgtacgatagccgagtaaccaagttcgccccagcagaactggcgcatcccctctatgtcgcgccagacgtagaagggcgcgtaggagttctggggtgcgcctttgaccttttcttggatgaggtaggccttgaactccagtccatggtagccgtccatgaggtgtccagtctggatgacgcggtcgcggatgatctgcatgtcatagtcggtgggcagggtgatctgatattgcatggcgtacatcagcggttctccttggtttcgtgggagtaggtcgtgggggtgacgggttcctgccaatcgatggttgacaagtcgtcggcggcttgttggtaggtaaggtggatcattggctgtttgagtgcagcgccatgccagtgtctctggccggcgtcgatccagatggattcgcccttggtcaggtgctggggtgcttgtccttcaatatggaccagggcaacgccgcccgtgacgtagaggccctgtcccttggggtgtgtgtgcctcagcggcaaacgtgacggcgtgggcggcacgcccggcgtcttccgtggcacgatcggccggatccatggcggcgcgcagctgctgttctgcagccaggcgtccaggtcacggcgggcagcatcgacacccagggcagcctcgacggcttcagggctacgacgctggccgggctggttgaccgcagaccactggtgccgggcgtcgtccagatcatggccggcggcgtcgatgagggcggtggtggcttcggcgcagcatcgcctgatccactccgaacgtgacaggccagctgtctcggcggcactgtcaatgcgcgccaggagagatttcatgggcgctcatctgtagcctccagataggcgttgatgtagcgcagagcctgatccgtcatgtcgatggcggctgcctcggcagacgacacaacgggctgtggatgataagaccacccaacatagacggcgaacatcaatttctcgacagctttcatgaggtccccggcggcaaccgcatccgcctcatcatccgaggagaaccacttcaggtctgaacggctgtacatagcccctaggtcctgatgtgggtcgaggtccttg

SEQ ID NO: 289 - DNA, 3086 bp, Propionibacterium acnes
ggttacccactcccgctcatcggagttgtcggtggcaataatgcgcccgccccgggccgcgatggctgcgcacagccgcttctcggccatcgtcttgcccgcgcccatcttgccgatgaacgccaccgtgttgcctttctgatcctgagtgtcggcatgcaaatcgaggtaggccagcgactgcaacggggagcctgtgaccacagccaacgggatgccggtggtacggcccaaccggtactcaaccaccgggatagatgcggcgaacgcggaggcgtgagtcagctgacggtaggcgttaagcgaggaggagaaccggccaccgggccgggcagcccacagcaagtcctcctgacggcccacgggacgcacccacgtgaagtcaccgaacaccggatcattgacgaacgctcctgccagctcctcggtggtctcaaagtcaggagacgagacagtgacggtgataagagcctggatctcgacctcacgctcatcggcggccagctcggcgttgtagtcgacgagcacctgagcggaatgctcgatagacatgagggtcgaagcctgggtcatctcaccgccctcaacattgtcgagctgatcgacggtttggcggatggcccgctgatttttctgcatcgcagcgtgacgggtccgggccactccccggatcgccacgtcgaccggcacgccagtgtcgtcgatacggcccaggaactcgtaggcaggccacgtcatcgtgcggggcaccttacccagcacgatatgggactggtagacggtctcgccggtgtcggcaccgattttgaggacgcgacgattccacgcctgagccgtccgggacatgtgggagactcgcttgtcatcctcgctggccagcaggtcggaggtcgcggcctcatcgatgaccaactcccccagcgcggcacgtccaacctcatccatgagggcgattccctcgccaggggcatcatcacgcaaccgggtcgggtggcctgacaggtgctgccgaagccagatctgttcatcaacggtgaccgggcggggttggaacgctgccggcagtttcgcaccgaattccttagcctgacggagggcccactcccgtgcgacacggccaggagcggtggtcatgagtccggcagcttcggtgattttgttgagggcggcggtccaggcggtgtgggtgcgtattttctggtcttggttgagtttgatcgataggaaccacacgcgccggcctagggatgcggtttcaggctggtcgagggtggcgtcgatttcgtcggcccacacggggtgttcgctcaggtcgaggccggcggccatggcgtcgacgatttctgtggggtcggtccaggtgagggccccgttgaggcagaactcgtggcgggcgaggtggcggaataggtcgcggtgagctgcggcgacggtgagggaggcgttctcggtgacgggtcgctggaggggagtaagtcgccaagtggcccagatgtcgccggtggaggtccagacgaggttgtcgaagaggaaccgttcggggatggacatcatgactccttttcggcggcggcgaggaaggcttccaggccgctgcggcgtacagcgttcccggtagggtgcaggggttttctgggggtgggttcagatttcgaatgtgggaagagtttgtggatggtatcggtgtcctcggcgagggcttggtcgagcaggcaggtggccggggtgtcggtcatctcgtccagctcgtcgatcatctcgtcgaggaggttgggggtggtggatgcggcccacacaggtgggatagccggtgcgggtcgaggcggtgtggggaggcggagtttggtttggccccagaggggtgtgtgggtcatgccggcgggagtggtggcggcgtgagtggtcacacgccaccagcccgacagccatgccagaggtgaccaggtccagtcgatgcgaccaacaacgaactgggcgagccatccggcagccagcgcgaaaatgaaaccgcggatggtcatgcccccgtcgataattttgaagcccatcatcgcggcaggaactacgccgccgacagcgagcacctgatagatcgtgtagggcccgccaggaatccttcgacctgaggaatccttgccgataatgcggggctgctggcgggcctcggtgtgccactgaatatccacgatcagctcttgcccaatccttgcatcatctgtccgaagaattggatcgcgttaccttcgataagccagtgcgccataccacacacaaacagcatggagacgatcttggccaggctcataccgtgtttgaagatgttgaacgcggcaatgcccacgactacgaccatggcgacggctcgcaccgcggactgaccttcacctgccttgatcgtcgtccattcgaagaggttctgcgattccagtggcagcaggaggaattgatcgagcatgagaggttttcctttcaggaagccgaccgggatggtcccggtactgacgggctggacggcacgggtgtgccggccaggggcagaaggcgtgacggctggtcgagggcggcaacctcccagcggcctgcacgactgacaagagtcaggccgtactggctagtccgggtagtggattcgtcaccggtgggctggcatgtcacggtcaccgtgacggtaatcttctgccgatctgagggggtggggacctcgtcaggccccaccacatgagtggttttcaccgatacacacggggctgggtcaaccgcggtgaaagcggtccccgggctactccatctcgacaggtcagtattcccggtcagcatggcggccaagaaacccgaagaggtctgggcagccgggtcagcaggacgaatctccgaggagtccacgtcgggggctgaggccggtgcaggcatggggatctgcccaggtagacgcaaggcgatggccttgccgccggcatcgacgtggaccggaaccgaccaggcctgtccgctcccggattggccgcccatggtgaccacggtgacctgccacaggctcggatcagacggggagacggtagcgtcataggcggtgacggtggtgggcg

SEQ ID NO: 290 - DNA, 3075 bp, Propionibacterium acnes
attttgtccacccacccctgtcgattttgtccgccaagtattagacaaaccattagacagtgaattagaccttgggtcgcgtcagcgtgttagctcaccaacgcgcgcgcgcgcggcggccgagccgccgaagccaaagaaacccataccaccaacgcctgaaccagcagcccccgcttcagacagtcctgtgtcagcgcacgctgatgaggctgccgagttggcgtggcggttcgtggggtggtgtcctcagctggtaggggcaccgaagaaggtgcgtggccagctccgtcagatggttgccaagcagatccgtctccatcgtgcctggctggatgtgccggcgttgactgttgccgctgagcgagtccgggaaatcggggcgctgggtgatcggcactgcgagatcgttcgagacgagctgcacggggtgatcgccgaccagaaggccgcccccgcccgccccgacgccctgcacgcgcgggagcccaagtggtgggacgacgtgtactacgaaggaaacacaaccgtgtggtacgactctgacgaaaccagtgacgacgacgaggcgtggaaccggtcgcaggtatgtcatgttgctgagcgtgacgacatggctggcgggattgctaccaacctgctggcctcccacgctgatgatccgatggcctggctgactcgccgtcaaaccatgctgatggctcgtttcccccacgcccagaacgaggtcatcgcgatgtgccacatcgtgcgcaccgccctggaggccgacatggccgccggaacccggtgggaggactgatgagggtctcccggcgcgccctcatggccgtggcccgtgccgacgctgccgcagcagaccatgccaccggccgatgggtggccacagccaacgccaccgtcgcccggctgaccggactgtgcgaacgcaccgtccaatacgcccgcgccaccctggtccacctgggcctgtgccgcgtcgtggccaccggccgctacctcaccgccgacgagcggcgcacggctgctcgcacccatggcggccgccagatgcgcgccgcctccacccgcgtcctcaccatgtcctgcgcaatcgtttgcgccctaccccgaaggggtcaccactacaggaaagttaagttcctagatggtcaccaacgcacgcgcaggcgcgtgcgaaggccagcaacaccagagaagaaacccctgtggctgcaaaaactcgcagccctcctcgaccagcacctgccctggctggtgagaaaccatcacatcggccgactgtgccacgccctcaccgccctgggcatcgacgaacactggcaacccgcagacctcgacgccctcctcgacgccatgaaccgcaggaaccgtcgcctcggcctcgacgtgccatgcgccgacgaccagcacaaccccttgggactgttcatccaccaggcccgagacaccctcacccacgacaacccccatgaacgccgcctggcccgcgaacaccaccgcgcccaactcatcgacgaccaactccgccgccgcgcagaaaccgccacctgcgcagcccgcctcgcagccgagcacgccgaccccgactaccagacccgccgtcgtgaacgcagggaaaccctgcgagccacactcagggccgcccagcagcatgtcaggacacactgatacccgctcatacacacaccgtgaaacacgacaagccacctgacagtatcagctgcaagacgcatgacaacatagaaggacatgatgaaatacacatagacacaaccccgcacagcagtttcgcaacaaatcatgatagtctcatggcagtatcgcttgatacacacatagcatcactcccacataggcagttatgctgatatactcctactaggttatccgtccaacatgctgagtgggttcctgtacagcatgaaaggagcatggcatgatatgggccgttctcaactgcaagggtggtgtcggcaagacgaccagtgccctcctgctggcggcagccgccgccaagcagggccacaccaccctggtggccgacgctgacccccagggcaccgcatcccagtggtcagccctggcaaccaaaaacgacgaacccctgcccttcccggtgcaagcggtcaacatcgccaccatggaggcactgcccaccaccaccgacgcccatgatctcatcctcgttgacacacccccctcggcaggcgatctgatgttccaggcatgccgcatcgccgacctcatcatcatccccaccgccacctccggacccgacatctcccgaacatgggtcaccatggacgccacacaaggcacaccacgcgcgatcctcctcacccaaaccgaacacaaccgtgtcgtctaccgccaagctcgcactgccctcgccgccgacgacaccgtcgttctcctggaccacgacatcccccgccgtgaatccatccgcacagcatggggcaccaaccccccagacgacgtcatcacctactacctgcccgtcctcaacgaactcatggaggccctgtcatgaccaccaagaaaaccgacccattcgcccgccagaaagcagcagaagaccgcgcccgccaactccaagacgaagcccaacgccacgcccaccccaaacgcgtcatcggccccaccgcacgattccagttcgtcctgccagccgacgtgctcaccggcctcaaacacctcgccctcacccgcggcaccaccgcccgccaactcaccctcgacgccctcgacaccgcctacggcctcgacaccctcgccaacagcgggaagaaaacccacccatgacccgtgggtccccctgccaccaccccctcgacggcaactgtgtgcgagccacaggcccgcacacaggcggcagcccagtgccgtccccgccaggaaaggaactgaacttttctggagtgctggctccctatcaccccttatggtgctatcagatccagtagcgccagcccgagaggaaacccatgagctacatcgtccgcaccggaaatctagccggcacccccgagctgcgcgaggggtagccgacacggcggaccgtgcccctga

SEQ ID NO: 291 - DNA, 2821 bp, Propionibacterium acnes
ttcaagttccgggaactaccgccggtcacgctgattgattcccgggcgatctcgcttctgacgacagtggtcggtgaccgagaggagtcctactctgaccccgctgctgcggtgagtaaatcacgggcgtcccggatccggccacccgtccaagtgccagccagcttgatcggctaggcatcgtcaaggagcgacgatgaggtgatgatgcgatgtgagcgcaccgcgaagtgaggtataaagaagccttcccgggcgcatgcgtcgcccaggaaggccaggttggcccctggacggctgaatggttgggcggatcaggctgtagcggagacgtgcagtacctcgtaggcgatggcgttggttgggctctggtctgcatcgtggctactgagttcgacgaggatgacggtccaggtggtgatgtcgacggcggtgacgcgggcgatggtggaatcagtggatgctgcaaggaagtcggcggttatgtcttcgatgcagtgggacggagcagtgctggtgggcaggggcacggtcttgacggtcaggcttcgggcagcagagtaatcggcggttccgttaacaagctggtggacggtccagtcctggatcgggtgccggccgaagtcgcgtacgatagccgagtaaccaagttcgccccagcagaactggcgcatcccctctatgtcgcgccagacgtagaagggcgcgtaggagttctggggtgcgcctttgaccttttcttggatgaggtaggccttgaactccagtccatggtagccgtccatgaggtgtccagtctggatgacgcggtcgcggatgatctgcatgtcatagtcggtgggcagggtgatctgatattgcatggcgtacatcagcggttctccttggtttcgtgggagtaggtcgtgggggtgacgggttcctgccaatcgatggttgacaagtcgtcggcggcttgttggtaggtaaggtggatcattggctgtttgagtgcagcgccatgccagtgtctctggccggcgtcgatccagatggattcgcccttggtcaggtgctggggtgcttgtccttcaatatggaccagggcaacgccgcccgtgacgtagaggccctgtcccttggggtgtgtgtgcctcagcggcaaacgtgacggcgtgggcggcacgcccggcgtcttccgtggcacgatcggccggatccatggcggcgcgcagctgctgttctgcagccaggcgtccaggtcacggcgggcagcatcgacacccagggcagcctcgacggcttcagggctacgacgctggccgggctggttgaccgcagaccactggtgccgggcgtcgtccagatcatggccggcggcgtcgatgagggcggtggtggcttcggcgcagcatcgcctgatccactccgaacgtgacaggccagctgtctcggcggcactgtcatgcgcgccaggagagatttcatgggcgctcatctgtagcctccagataggcgttgatgtagcgcagagcctgatccgtcatgtcgatggcggctgcctcggcagacgacacaacgggctgtggatgataagaccacccaacatagacggcgaacatcaatttctcgacagctttcatgaggtccccggcggcaaccgcatccgcctcatcatccgaggagaaccacttcaggtctgaacggctgtacatagcccctaggtcctgatgtgggtcgaggtccttggaatgatggaagttcctacacacccatcgccaaagacctcaacatggacaacgctaccttcaccactccctcatctgtgaagagccagtttatgcacggtgttgaaagaggcgtcggtctacgacgaatgcgggttaatggtcttgcggtgtggggcgctgggcgatggcatcgagaacgcgtgagtgggtggcgatccattcggccgcgtcggggttgatgttgcgggcgacggtgtcgatcgctgttacgtagtgggcaagcctgcgaatctcagcttgttggtcagggtgagcgctgatgaggggctcttgatgggaggcgcggttacggacgtggcggatgagctccacgttttcctcgaagtcgcgtcggctacgccccgggtagtgaggcatacctccgttacgtaagtcagtgagagctttccatacggttgcttccaggcgcggggtgagcagaaagcgccagttgtccagtgacagactcgccacgatctgatcaggggtcgcatcgagccccgcgcgccgcagtcgcgcctcggccctggcgacgttacgcgggaaaccaccgagccgatagctcggggattcccaccaacgccgtatgccagtatcggcgctcaggcgcacgtcaatgaagtttctcaggagtacctcgacatggctgatgtcttccaagaacgctttcgagatgcaggtgttccacacgtaccacgcatcgactggttcgatccggtagcggctgagcctggcgggtgagaaccactcctgcaacgtctcacgactcaccgtgggagcgtggtaagattgatgacgataggcctcgggaaggtcaatgccgcgaaatatcggtatacccccgaggtcattgtcttgcccaggcccctcctcgcatacttgcggggcgtcattggctgccgtcatctcgtctcttcccggtacgtggctgtccatgttcacgggcaggtacggcaatgaggttcccgcacacaaacctctaccaagcatacgctggcaagccgttgcatgagacgacgcctccgcccgccacaccaacggtcaccgccacggccacggtgaccgtgaccgtg

SEQ ID NO: 292 - DNA, 2653 bp, Propionibacterium acnes
tggtagcagtaggcattcacccgtgacccacggttaccggaagccccgccgcaatcgataccactgtcagtaccatcaggggcgataggggtcaagctctccttgtcacaatcccttccccggcagcccagtaaccgtcgcttacagccatacatggatatgcgcccattcgtcggcaccgacgccgtgcgggttggcgacgctgacccgtctgctcacaaacgacccttccagcccagcaccacccactacaccgacacgatccacgaagctgaaaccgaacctcccatccccgtccgaaacatcaacgaactcatcaaccccaccaaccatgcatgaacgcacgatcgcctaccggccagccttcctgcgcgacgtgaagcggctcaaaaacaagcactacaacatgaacacacactcaaatgggcggtaaggtcacgaagtcgacgtggctgcctcacggatggcttcggcgagctcttggggtcgactccacatgggccagtggccggttggcagatccatcgcggtgaagttggtcaggtgcgcgacggcgctgaacatcggattgcctgctgcggccagctcgaggacctggacgctgggaatggagcagcagatcaacgtggttagtacatcatggcgagcgctattggacagcgcgacccgtgcccgggccacttgcgcgggttcaggaaccgcccgtgcccggaaccggtcaaggtgctcgttgctgaggccctctaaactggcctgcttgccgagagtatcgaagtcaggaagtggcagctcagctgtttcctcaggtagatctggtgcgaaggcacctccatcgctcatgggaccggagtccacccagacgatccgatggaccaactctgggtgcctgtctacaactaggctcaccggcccgttcgcgccactgtgtcccaccaggaccgcatcgccgcccatctcgtccaggatggctgagatggcgtcagcttggtcgtcgagcgtgcgcgtagtgcgctgggtgtcctccggatcgaggccaggcagcgtcagccccacggctcgactgccagcagtgttcaataactcgactacctcgtcccaagcccaggctccgagccagtaaccaggaacgaggacgataggccgatgctggtcaggtcgcgatgttgaagtcatggagacatagttgcacagtgcgcggacaagggagtggcactatttctggcatgaatttagatctgggtgtccggtgaggcgatcagaacgcctccatgtactgtccgagtgtctacgatgcagcggacacagtcgagcagctggctcacaagtttccaggtgtccttctgcccctatgagggaagtcggctgctctcgcaacctttgagggctgctctggggtcggaaccagttacagatcgttcaagttccgggaactaccgccggtcacgctgattgattcccgggcgatctcgcttctgacgacagtggtcggtaaccgagaggcgtcctactctgaccccgctgctgcggtgagtaaatcacgggcgtcccggatccggccacccgtccaagtgccagccagcttgatcggctaggcatcgtcaaggagcgacggtgaggtgatgatgcgatgtgagcgcaccgcgaagtgaggtataaagaagccttcccgggcgcatgcgtcgcccaggaaggccaggttggcccctggacggctgaatggttgggcggatcaggctgtagcggagacgtgcagtacctcgtaggcgatggcgttggttgggctctggtctgcatcgtggctactgagttcgacgaggatgacggtccaggtggtgatgtcgacggcggtgacgcgggcgatggtggaatcagtggatgctgcaaggaagtcggcggttatgtcttcgatgcagtgggacggagcagtgctggtgggcaggggcacggtcttgacggtcaggcttcgggcagcagagtaatcggcggttccgttaacaagctggtggacggtccagtcctggatcgggtgccggccgaagtcgcgtacgatagccgagtaaccaagttcgccccagcagaactggcgcatcccctctatgtcgcgccagacgtagaagggcgcgtaggagttctggggtgcgcctttgaccttttcttggatgaggtaggccttgaactccagtccatggtagccgtccatgaggtgtccagtctggatgacgcggtcgcggatgatctgcatgtcatagtcggtgggcagggtgatctgatattgcatggcgtacatcagcggttctccttggtttcgtgggagtaggtcgtgggggtgacgggttcctgccaatcgatggttgacaagtcgtcggcggcttgttggtaggtaaggtggatcattggctgtttgagtgcagcgccatgccagtgtctctggccggcgtcgatccagatggattcgcccttggtcaggtgctggggtgcttgtccttcaatatggaccagggcaacgccgcccgtgacgtagaggccctgtcccttggggtgtgtgcctcagcggcaaacgtgacggcgtgggcggcacgcccggcgtcttccgtggcacgatcggccggatccatggcggcgcgcagctgctgttctgcagccaggcgtccag

SEQ ID NO: 293 - DNA, 1468 bp, Propionibacterium acnes
cgtccagatcatggctggcggcgtcgatgagggcggtggtggcttcggcgcagcatcgcctgatccactccgaacgtgacaggccagctgtctcggcggcactgtcaatgcgcgccaggagagatttcatgggcgctcatctgtagcctccagataggcgttgatgtagcgcagagcctgatccgtcatgtcgatggcggctgcctcggcagacgacacaacgggctgtggatgataagaccacccaacatagacggcgaacatcaatttctcgacagctttcatgaggtccccggcggcaaccgcatccgcctcatcatccgaggagaaccacttcaggtctgaacggctgtacatagcccctaggtcctgatgtgggtcgaggtccttggaatgatggaagttcctacacacccatcgccaaagacctcaacatggacaacgctaccttcaccactccctcatctgtgaagagccagtttatgcacggtgttgaaagaggcgtcggtctacgacgaatgcgggttaatggtcttgtggtgtggggcgctgggcgatggcatcgagaacgcgtgagtgggtggcgatccattcggccgcgtcggggttgatgttgcgggcgacggtgtcgatcgctgttacgtagtgggcaagcctgcgaatctcagcttgttggtcagggtgatcgctgatgaggggctcttgatgggaggcgcggttacggacgtggcggatgagctccacgttttcctcgaagtcgcgtcggctacgccccgggtagtgaggcatacctccgttacgtaagtcagtgagagctttccatacggttgcttccaggcgcggggtgagcagaaagcgccagttgtccagtgacagactcgccacgatctgatcaggggtcgcatcgagcctcgcgcgccgcagtcgcttctcggccctggcgacgttacgcgggaaaccaccgagccgatagctcggggattcccagcaacgccgtatgccagtatcggcgctcaggcgcacgtcaatgaagtttctcaggagtacctcgacatggctgatgtcttccaagaacgctttcgagatgcgggtgttccacacgtaccacgcatcgactggttcgatccggtagcggctgagcctggcgggtgagaaccactcctgcaacgtctcacgactcaccgtgggagcgtggtaggattgatgacgataggcctcgggaaggtcaatgccgcgaaatatcggtatacccccgaggtcattgttttgcccaggcccctcctcgcatacttgcggggcgtcattggctgccgtcatctcgtctcttcccggtacgtggctgtccatgttcacgggcaggtacggcaatgaggttcccgcacacaaacctctaccaagcatacgctggcaagccccgacgagacgacgcctccgcccgccacaccaacggtcaccgccacggccacgg

SEQ ID NO: 294 - DNA, 2704 bp, Propionibacterium acnes
gggatgaggatgacggccgcgccgacacttcggagcgaggtcatgtgacgatccttcggtagctcgacgggttgccgtagatcttttccacgttgatgccactatgtgggttgtcggcgctaaccatttggcctccaccgatgtagacggccacgtggtgggcagggcttccccagaggatgaggtcgccgactttgagctggtcacgggccacggcagtgccgactttctgctggtcggcggcggtgcggggaaggctaatgccgatacgccggtacagcgccgaggtcaggcctgagcagtcgtagccgccatcggctttgccgttgccaccccacacgtaggcgtaggagttgttgtcggcgatcgatttggcccatgccacggcttcggccaggttcttcgacacaccggtctcgttagcggccccggtggcacagttgtttgacaggtgccctgtagtagtggatcccactatttgtttggccatggtttcccatttggcgtaggcatcgggcagggctgagccttgcactgcctgagctgcctgcgtcagcggcatcttctgccagtcagcgatgtcgactaaaccgggaatgtggaatccagggccgccggccgatccggggccagcgtaggtgatggtgtggcctttcaagaacgcctcggtggcgtaggcatcattgttgacctgatccagagtcccgtaccagcccggcaggatgcgctgctgaaaggggccggcgtcaccgtcaccgttagccttcgctgaggtagggtcggccccaagatctgattcttgtttggcggtcatgatagcgatgaccgctgcctgggtaggcagtttgtcacgctggaccacagtgacgatggtggtcacgagctgcttctgcctggccgtgaggcctccggcacccacagtgcctccggtgacggtccccacgcaagcatccccgccgacactgccaccgccgccgccagagttgtcgtcgagggccccagagcctactgacagcagcggcacaatgatcacggtcgctggcaagaccgccaggcccgccagcatcagcactgctgcactcaccacggcgatcacgtgagatgctttcaacgctgcccacctctcgctggtttgagggggcgacgcctgctggtacgcacaggcttggttgatccagtccgccgttggttggcaggcctgggtttgatcggcttgctgggacccggtttgggctccggagtcttaggctccggcttcacatgcctaggcacttcggctgcggtgggaggagtcagcacgtggcgtactggcttggtgaccttctgggcacccgaaacaaccggcttagacaccaccttggcacctttgaccaccggtgcggctgccttcgcgccggccttcttgactgcacgatgcgctttgatagccccggcctcggcccggccaaccctgctagcagtagcatcgagggctctgtggcccgtcgttgccctcaccggtgcatccttgccctggcgggtctgcttcgcgatcgccgacatgccgcctcgcaatgccgaaacatgattgtgggcgtgggcgatcgccgacatgccggccgtcgcgatttttgactggccctgcggggcccctgccccagcacgaatctgccggtaagccgccgacgtgccacgagcacccgccgccattcgcgccaccttcgcagccctagtcactcccgtcgacacgccacccgtggctaccgcagcagcacccgagaccacagtcgaggccatccgccttcgacccgatccggtgagcttgcgaccaccgctgcgcaccatccggcgagcaccccgcccagcccactggccgatcaccgagcccctttcggaacgcttgctgcgcatccaatcgttgatcttgtccctcagccccttctcgcccttgtgacgacgccacatggacatcaagaacccgataatccccacgagctcgagcatgttgacaaccatgaccttgatggcgacatcaccgtcagaggcgaaaaccgacttgatgatgagcatgaccacacccaacatcaccatcgacccgacaatgccgatcatcgagtacaagatcgaacacagatcccggatgagcggatctgtgcggccagggatagcccgcaacacgttgagcatcgacatgaacgccgaccacaccaacttgcacacgtagaaccagcacatgcccgcgaacaccagcaggaccacagccaaacccgccaccgtcgacgagtaaaagaagaaacccaccaaccacgaaccatccgcaatatcgccggcgtaatccgacaacccctcatcacagtcaccaaggtcgtcgcgagcatccgagacgtcatcgtaagggccacccttgagcacctcgatgtacttgtcgtggcacttcgcatcaataatccggccatagttgagctgctgatgaaccggcgccacgaacgagtccacaatgatcgccgacagcttcggatccttcgagtctcccgtcgaggtcatgtcatcaggaatctcgacctcaccagcggtcgccgtcgcaggatcaaccgaactggtaatcatccgagacagcgccacaccgaactgctgggtgcgagccagcggagtagccaatgtcgtcgtatcgcctgcgaacttcgccaccggggccgccaagaaacccaacgccagcgccgcagca

SEQ ID NO: 295 - DNA, 2471 bp, Propionibacterium acnes
aggcagggtcgtcgggttcctcgactaccggaggtggggtagggctgagctgttcggtgtcgtcggccaggtcggctcccaggatgcgttcccattcggggctggttttcttgcccgctgaggccatcgtctcgtcgatctgttcgtcagtgggccacacaaatttctttttggtccaggtcgtggtgtcgggtcgcagctgatccagcagttccaggtcttgcggggagtgggccttgcgggggtcgggggtgtagaagaattggacttccttgggggctgattcgccggataggtaggtgcctcggccgcgtttaccgaacgggatgcccacgccgacgtgttcggagccgaacatcatgcgggctccgtcagcagacaggggtccggtggcggcacgcccggagaagttgtctcggatttcgccgcccaggaactcggcgtcggggcgttgggtccccagatcgacgtggatacggcaggcggctgccatgcgcagcagggagccgatccagccgaaaacggggcattctccgggcatcccagagaccttgatcgttgaccaccagtttttcgcgttgccgtagaactggcggtactcgtcgatgaggaccagcacgcgggtgaagtcggtctcgcgggccccttcttcttcgatgcggcggtagcggtcctccatgagagaccacagccagtggatgagggcgacctggtcggggacggtagtggcgaccatctcgatgttgggccactcccgcaggcccaggtactcgatgcgtttagggtcgatgacgaagacgcgccagttgcggcgggcaccctcgacggcgtcgccgatcatggacaccgtttttccggtacgggtgcggccggccttgagctggtgggccatgacaccggagatgtcccagaaacaggtgttgccgtcctcgtcgacggcctgggggattttctcccagtctggggagtctgggccgggaagggccacgggtcggggcaccatcgagggcagggggtggcggcgggtgacggtgatggtgtcgtgttccaggtcgaagtcgctgcgccactggccgagcatcatcgccgaggtcaccgcggccaggcgcaattggatgttcgggctggacaaatgggcgccacgttggtggtgaatggtgaagccgtccaggttcccccgatcggttttccaggaatcgacggtgaccgccgacccatagatctgagtggctacttctttagcccgttccttgtctcggtccagatcggttttgtcagggtcaggggtcggggcgcggtattgcaggacgaaccggccggccgggatcgttgcggatgtcaccgtgaactctgccggcgaccaggcagccgcggccgcctgggtgagggccattggcatggtctcgacggcagcctcctcgggggggatggtgagggtcaggcgtcgcggatgcgtcttcttgcgattccatgtgactttctgcctcaccggcaccttcgccgccgactgaatggctaggcgagctgattcggcagtttcggtacgccggccagcgcgtagcgcccgtcgtgcgtgaaggctgcccaccacagcacagcccatacacggcagccaccagcgcggatcagcggctgctgcatagcccccggtagctagtaccgcacctgaccagccggccgcgatacttttccacgccggtttcgcgccaccaggaccagcgttatggacggtctgcttcgaggctgcggagggacgagacagcggagtgctggtcatgccgcggcctccttgtggcaggtcatttcacaggcatgccggccagcgatgatgccgtggcgcaccgccccggtagccgcatagaccgcgcacaactcaaacacggggcacccatcgcaggccgccgggttcatgctttctttgtcccacgatggtgggtcatcggtgcacggcacggccaggccatcctgttgagcggcgctgatagcggtgaataggcgcagctgggcgcgaacttggtctggggtcaggttgacggtgcgggctacacgcatggggttccttcctcttcaccagtgaaggttccctagacccggccgatgtgcggagagatttcagtgttttatcgaggtgaccagccatccggtctgcgctgcgggttcaggtaccagggtcagatgcagcatggtgtggtcggctaggggcacggcgaccaggggcccgtcggcgctcgccccggtgagggtgggagttccggccacggtggtggcaggaatctggttgggtttcgcggccatcagggagcccatgagggtcggtgcggcgatctggacgagggcgactttgcgggcggcgggatcgcgggtcaaccagccgcgggtgaaagcgagcgccgccgacgtgatatcggggctcagcggggctggagtggcggctgggtgggccgttgaggagggccacacgcgcggtagcg

SEQ ID NO: 296 - DNA, 2537 bp, Propionibacterium acnes
ttggtattggtaggcgatggtgtcaccggttttgttgcggatgacgtcgaagccttcgatgtcggaggggatgtcgtcggcgtcgtagacgacggtggtggtgacggggttggaggccgacatttggccgatggtcacgcgcagcatgtttttcaacgcggaggtgaggattgtcgtggcggtggggttcttgtctgcccagcgtttctcggcgatgtcgatcatgtcttggatggttttgacccatcctcggatgggatcgactttggtcagtttgatccctccaaggaactcgatgggcttagtaacgggcccgtcaggaccgaattcggtgtcccagccttcgtcgatggctagtttcagttcggcggcgtcaacccatgtttcgtgggtggtgccgggcacgttgggccaaaaccatcctgctcgtcctttggtgcgtttgaccggtagtaggccgatgtcgtcccaccaggatggcacggtgaagcggatgtggtagcgggccgggtgccaggggttgttggtgaacaggtcgtgagcttcggtggcgctgagcagagtggcgggtgcggcaccgatctctccggtcactgatccggcatacatgaatcggccgtcgatgtacacgaagttagggatagggccggcaggcacggtggggcgccaaccttgttcgcggtcctcggggttgccgtcgtcgacgcatagttcgtagcggtgctgaggggaggtgtgttggatgagtgcgcccagttcggggtccatcggctccatgcgataggactcgggggtccgtagcttccagaggttgattccttctgctccggggcggtccatgagggcccagtcgcggtcgattctggtggcgatgatgtgggttaattcgcgccatgcccagcgggcctggattggggtgagggtctggccagggaaccattcatcagcgaccagaatgtcgaggttgcggtcggtttctttgtgggtgaaccggcctcgggcgggccgcccggacagcatgaacaggccccgcacgtgccagtcctggttgaactcgcgggtgtgagcgggggtgtcaggcagcagccaggattgaggctggtcggggatgttaccgcagacgatcaggcgtcgggcgttgtggtgtagcgcggttgttagcaggtctgacagggtcgcgtgcttggtgcgccgcccccctagcactggcaggatctcgtttccggccgcgtcgactccccgggcggtgtcgatgtctagccacactgtttcggggtcggggggccgatgtggggcgggacggcgctgctcctggtcgtctctcatggtttcctcctttgggccagggagcggccggcgtcgagggcgttcatgcgctcgcgttgttcttcgcgtagttggtagacccggcctcgtgacactcctgctgcctcggcgatggtggtggccggcaggtggccgatggcggcagcgtcggcaaggacgtcacgccaggccaggtcaatggttcccagctgggctagagcttcgtcgcggcggcgggtggcatcagccactacggaggcccaccctgtggggtggatggtcttgacgacgattcggttgtggcggatggggccccatgcatcagcggggacttgccagccgtgattggcggcggactcggtgatcttgaggcgtcgctcaggtgcgcgggtgcgggcagtgacgtcggtgttccaggtctggactggtacccacgtcccctctcggatgcgttcgatgacgcacgtggtgacctcgtcggtgactgtgatgaccagacgataatctttcccgtctggggtggttcggtagctgggcatgtcaccctcccctatctgtcaaatgagctagacacagtgtctatttaatttgacgcaaagtcaagtgcattagacgcctttgtgtggatccgccccaccagacaaacactcgcgcctcatgacccgccgcgaagccttaacgaaaccaaaccgcttatagaaccgctccgcagcgctccccgagggctttagctccaaggtaagaccttgctcgtcggcccattggcagacttgtgtgaggatctgtgagccgtagccctgatttcggggggcggcatgcacgcacatcagcatgtgaccatgacggcgggtcggcgggctgacataagccccaccacgccagtccggtgtgatctgccaacttcgccatgccgcagcgcgccagcggcgggcctcggtagccaccatgatcaccgcgacgacgacgagcgttgcggccccgatcatggccagctcactccagccaggccagttcccggagatgatccagcctcccagcgcccagatgatcatggcttccacgcccgccgcaatcgggacgagtggggcagtacggatgcggcctgccatgatttcggtgatctcgctgcgatgccacgaccaagagaactcccacgaggcacgaattaggctcatgcgtgaacggcttcctcggcttcgctttgccatagcttctctagacggcgctcggct

SEQ ID NO: 297 - DNA, 2332 bp, Propionibacterium acnes
ggcggcgcaccaggtgcgccgccttcccccgtgctggtgtctcgtcggcttactggtgggggtcgtaggggaacccgtaggtgtgttccagggccttgcggagaaggtcgttcatagttgtgtgttcggcgacggccttcatcttcagcgccgtgtgggtggcggtgggtagcttgacgttgaacgcggtgatcggggtcttggccgactggaaggtttcagagacactggctccctggctggccgccatttggtcggcgtaacggctggctttgtcggcggcggtgggtttgcggttcttactcacttcagcatctccttgattcggtcggcaacctgggcgaactctcctagatctgttggccgggttccgatggcttgccgataggcgacccgtcgatgaacctccgcatcgagaacgtctaggccctcaacggcggcggccccctcgtgggcatcacggtattgcctggtccaatcggctttgttgaagagcagggcccggcgtgtgccgtgggccacctggtaggtcattagcgctcggtccatgtccaggtcccccgactcggtcgggatgatgaccacatcggcgatgtcgagggctgcggtgatcgtctgagagtcaccggggggagtgtcgatgatgacaaggtcggcgtcgatgtcacggcagcgcctgacgataggggcattagccgggcggacctcgaagcccagcgggtcaccagtctcgaaagcgtcggtagcccatgacgtcgccgatccttgcgggtcggcgtcaagcaagatgactcggtactgagctgctaaggccgttgccaggtagaccgccgtggtcgttttcccgaccccgcccttggtgttgacaatagaaatactacgcataaatacatcattacacatgtgcatcgatgtatctgtatatatgtgtatcggcgtgttgtgagggaaaacccgggccacatacaacgatcccccagccaccacagccgggggatctctcagtaaagccagcaactcccacagaagttgcacccccacgatacccaccacatccgtgtcaagcccccacaacacccaccagcgccctaggcttcccccatgaacattgacatggacacaccaaccgaaaccgaagccgacaccttcgatgccgtcctcgccgacattaaccacatcaaccgcctcaccgccgacgaaatcgagtgctactccatgggagcctgtctcctcctcctcaaccaccaccccttctccgaactccgccaacactgggccgacaaccccaccgacgaaaccacgtggaccctctacggggccatcatcgccgcctccaccctggacccccacctcagcatcgacgccctagcccgcctctaccagctccccctcgacctcgtgacccaagccctcaccgtctaagcgtcgatgagcgggggagaggtagcgcactatcggctaaggaaccccacaaacaccaaacccttgtcactgggaagggtttggtgttatgctggtctcacaactcaacagaggaggtgagacatgggaaatgagtaccagaagtcgctcaaagtcctgttcaagaaactggaatctgagcaaggagcccgcatcgagacccggcgcaaaggatggatgatctacccgccggatacgtcacgatcagcggtcatgatccacaagactccatcagatcgcagagcatgggccaacatgctttccgaactgagacgctcaggattcaccgtctaactcagtgaagggggctggagctccagccccctttcaaccacctcccccggacaccacacaagaaaaggagaacatgatgtggcacgttcggttgtcgcttcgcgcaatcagcgaggacatgctgttcgacgccctggacaccctcgaccccttatccccggtggccacactgggccccgatgagcacaccggatcattggcggtgttcgtcgaggctgactcactgacagacgccatcgagactgcccgcacagccatcaccaacgcatgcaacaccgccaccataaccggcgtagaagcccgccccgaagacgaatgcttcgcagacgttgaccggcccctgttcccgccagtggtcggatacaccgaaatcgctgaaaccgcaggactctcacgtcagcgcatccgccagctcgcaggcaccgccgggttccccgcacctgtcatcaagaccgcggccggcccgctgtttcccaaagccgccgccgagcagtgggcgcggacacgccagcctaaggcaggccgcccaaaactccagaccaccacctcataacacatcccgtgtgctgaacctgtt

SEQ ID NO: 298 - DNA, 522 bp, Propionibacterium acnes
cgacgccgcggcggggtaacctcctcgccccgctccaactgtgttaacgcctcgaccaggttggtgcccggtttcagcccttttagcacgaaccgcaccaggcgggggtctcggccgattcgtcgggcaatctcggcttggctccacccttcggctaacagggtgcgcaacaagtcttgggcccggttatcacgctcagtcactggtcgcctcctcggggagtcctgcctgctcggcctgctctgatagagcagcccgttccgatccggtctggggcgcttccaaagggcccggcaagacacctttgacacgcagccgcccgtccttgccgtcatcgccgcccccctgggccacagggagcgcccaggggggcacgttgctggtgtagatggcgtcgccgtggatggccagcagggtgcgggagttcatgcgtagtgctcctcccttggttgtggcgttttttccggtggtggggtcggcgatgggtgtgttgagggtgcgtacgcgggacagggcccagat

SEQ ID NO: 299 - DNA, 522 bp, Propionibacterium acnes; identical to SEQ ID NO: 298

SEQ ID NO: 300 - DNA, 2317 bp, Propionibacterium acnes
aggtcgggatgatgggtgctgttgctgatgcggccctcgctgctggcggcgctgtgatcggagtgatgccgcagcacttggtggacggggagatcgcccatcctagtctgactcacctcgaggtagtgcggactatgcatgagcgcaagcagcggatgagtgacctagctgacgcgttcgtcgcgctacccggcggcggcggaacccttgacgagctattcgaagcatggacatggcagcagctcggtgtacacagcaaacccgtggccttgtacgactcgaccttctgggcaccgctgaccgcgctactcaaccacatgaccatcgaaggcttcatccgccctgaggaccgcgcctcgctcgtgatcgccgataccatacatcagctgatggccgatcttgagggatggaccccaccaccaccgaagtggcgctcgtgacatagaacaaatgattctgactatggctcattgacatctgcgcagcggctactagctccattgacttcaaatcgggccttggccgaggctcggttcaggtggcccggaatggatccccacaaattgaatgctcatgatcgaggtgatgaacgcccactctattgtcctacgcccggttgtatccagcgagcaattgaaggtgctgcgcctgttggtcgaccaggccgagccactcatcatcgacgggcgcatcttgtacgaggcatgggacaggctgcaaacagcccgtccggcccgctagaaaaaatttttagggcccgctccgcacatcccggtctgtacccacaccttcaagggtgtgaagggaataaaaacacacctaacaacaactttgtttcatgatttggcgcgtcggaccctttctgaccgatgtcgtgcgcaacaatggacccatgagttcgcctaccaagatgcgccggaaggggacacgcggcccgaaacctcgcagcgacgaggagctaacggctgtgatgttccgcgtcccagagtcagtggccgaacgtgtcagcgatatggcttgggagctgaggctctcccgatccgatcttgtgggctggtcggccctctatgcactcaactcgatgctcagacagcgcggagaggacacgattccggttccggagtatctggacaaggccgtgctcgctgcgttgtatcccgatgggttgcccttcgacgaggacaccgaggagccgggcgagaatgccgggcaggaggagcttgcgatgactggatgagcccgaacatggttgaaggccgccccgccaggcgaccttcaatcaatggtttcggttgtcagctgcagccacccttgccaggtgctgtggttcttctccagaggaggagggaccgccatgaagacccagaagacctagaagatccaaaagaaccggtttcggctgttgcttcggtcttcatggtagctgatagcccgcgtcgttggaagtgcgacgacgccgatcctcatcggtatcgcaccctgttccagggtcgagaatgtgaaggattaacaaccatgacaagtcatgagacgccctcccggagggcgtcatgaccgctttaattcaagctctgccgacagctgaactgtctgctggacctggtgctagcagtccagctagaccctctgctgagggcttcatcaagattcaccacgacctcattagtgcgggcgtgtcgggtaacgcgatggcgttgttcgtcgcgttacgtaaccagcccggctgtgatcagtggacccgtcactcgtacctgcggctagcccaatggtgcggctgggatgggctgtcggaggcggcgggctgtaagcgggtgcagcgggccgctgctgagctcgctagcggtggttggctggaatcgcgggtcggccatgatcgtcgcaccgctaagacgctggtgtggcatcggttgaccagccccgacaccgaccgctgggagcaattgccgcggattgtgtgggcgaggatctgccagatcgccggggagacgtcgggagagtgggtgaggcattggctggtgtggcggatgctggccggtcgtactggtgtggctcaggcccctacgtccatcgtggcccggttcctgggctgttcttcgcgccaggtctctcatatccgtggggctctcgttgatgccggtctgctcggctgtgacgaggtctcgggggcggcgagccgggtgtggttcccctcgatggccgaggagtgtgcagcggatcgtgaggtggtcgatggggccgtcgtcgatgctgaggtgggctctggtgaaggtgtcgaggagggcggggaacccctgtcgattttgtccacccacccctg

SEQ ID NO: 301 - DNA, 2290 bp, Propionibacterium acnes
cccccaccagccagcctggccgtcaacggatcaacgtcaccgtctacgttgtgcccgaactccatgagcggctgcgctcccgatcggcggcgacgggggtgacggtctcggatctggtggtgcatgcgttagcgttcgtcgccgatcatgcgggggaggcgatcgccgatgatctgcgcgtcgagacgggccccggcatgggggccggactgttcgatgtgaccccatcgcggccagtaggggtcgccaaaacccagctgggggtgcgaatgacccgccacaacaaggatggcttggaccagctgacccggacgagtggggcccgtgaccgcagccatcttgtgtctgtcgccgtgcgcgactatctcgactccaaccctgtaaagaaaggccgacatgtccgctgatgaaactcctgccgcccggggtgggcgacgctttgatacgaccgtcaagcccaggcgccgtcccatgcttatcgccgccggtatcgccatcgtgatagtcggcgcgctcctcatcactcagttgattcgctccgcccaaaccgagcatcgcgtgctggaagtccacgccgatgtggctcgcggcgaggtcatccgtgacaccgatctggtatcggtgactgtcggccaggtcgacaacgtatcaacggttcccgcagaccagctcgactcactggtcggcaaacgcgccacggcagatcttcgagccggatcactcttgcctgctggggctatcggcccggccgatgtcgttccagctccgggcaagtcgctggtcgggctgaagctagccgccggacagatccctatcggagaccttgctgccgggacgaagctgcgcctgatccagacgtcggcacccagcggctcatccaccaccactgatagcagcaccaataccgatggccagtcgtgggaggcaacaatggcgaccggcaccaaaaagaccgagcaggtcaccttgatcaacgccgaagtgaactcgcgtgatgccgcccggatcgcccaactgacgtcacagggccgtatcgccgtagtgaaggatccgatccgatgagcaccattgttttgaccagcgtctcgggagccccaggggtcaccacgacagcgatcgggctgggcagggtctggccacaatcgagcctggtcgtcgaggatgacacccaccacgccatgctggcgggctacctgcgagcctcccagcacgccgaaccgaacctggccgcagtggcgaacctgacgtcgactccaaccaacgcccaaacggtgtgggaatctatcgccagacccctacccaccgatgacccagtcggcgggctgcgacgcaaaggcatcctcggcccgcccacgccgtggtctcgcgcaggcatcgacccccgatggggattcatgctggccctgtggcggcaactggaggaggctggcatcgacaccatcatcgatttgggtcgcctagccacaccactgacctcaacgccacacctgatcgccgcacccatcgtcgaggacgccgacatgatcttggtgatgatcgaggcgacactacgcgacatcgccggcgcccgcacgatggtggagggactcgctgagcagatgaacttggccggcgcctaccgacgtctcggactgcttgtccaccgtggcggccaggcccgcggcgtcgccgagttcaatgacaaggagatcacctcggcgttacgactcccggtcatcggggccattacccatgacccggccggagccgcccaactctccgacggggtcgggcagcggttcgacaagtcacgtctggcccactcactatcaaaggtggcggccagcctcgtcgatgccataaacaagcgccacgctgatgacgaggaggatctgtgatggccagttttgctgataatccgttcgacaagctgcgctcccaggatgcggcaagagcttcggtagagcaggagcctgatgccggattagcgtcggagttgttttcgacgtcgtcggggtgggccagctctcagcaggtgtcccaagctcaaccggtgatgacccgttcggagaacgtggattggccggttgtcgcggagctagccagtacggccactgatgaggttgaggctgagatcagccggtggagttccactcatgatggggtggcgacgctagacattcgccaggccatcgcggagcctgctattgcctcggcggtgtctacgtatgctgaccgacgccagatcgatgtaggggagacctggcctgatctggtacgccagcgataccgcaaggctgtgtgggatcag

SEQ ID NO: 302 - DNA, 2310 bp, Propionibacterium acnes
ctgtgggagacgatcatcacgtacccgttagatcgtcgccctgacaagatcgctgcgaacctcatcctcgacacgttgcaccgggttacccggttttggcgtgctgattcccccgatgaggaagaggctcacggtctggtgcccttccctgacactctcatcgccccagagcccgatgaggacgtcacagctagccaggccatcgccttggcggtggaccgcaactggattaccgaggacctagcccgcctcatgagccatatttactgtgacggtatgactggagctgatgcgggtcgtctgcatggctgcgctccagctacggtgcgatctcgatgccgtgatggtcgggccgtgttgcagcgcaacgccgagacgatcctggccgtctgctgatccctctcttgctcatgcctgccgccaccctacccctacctgctagaaacatagccatgtctccagcaacgcatctagcatatcttctagcaattgatctagctaccatatagctgatgatctagctatcatatagctgtgtctccagcccaaaggacagcccaatggcatgcttgccacaggaaggtgcgtcagcctcccgaaatactggaaggagctttaccgtgcaggacatgacctcgaccagaccgattgaccgatccccgttcgaccgcactattgcggtgtggaaccacaaaggcggcacgttcaagacgtccgtcgtggcgaacctgggatacctgttcgccgccggtggcaacaaggtgttgatggtcgacatggacccccaggccaatctcgacattgacttcggtatacccgcgggagaacgtgaacggggcatgggattagccgaggcgctacgtgaggggacggcccttcccccaccgcagcatctcagcgaaaaccttcacctggtcagtggcggcccggccctccacgagttcaccgaccccgcatccttagcggccatcctcgaccgagtcaccaccgcacgctacgacctgctagctcaggcccttgccccgctggcctgggactatgacctcatcttcatcgactccgggccggcccaaactctgctgtcccagaccatccttggagtagcccgctggctggtagtgcccacccgcaccgataacgcctcaatcactggcctcgtcgacgttcaagacgccatcgacggggttgcctcctgcaaccctgaccttcaactactcggcgttgtcctagccggcgtgggggcccgggccacccggatcgccgcagataaacgccacgccatcgacacagtgctgggggcaggaaccgttttcgatgcggtcatccactactccgagaaggtgtccgtgctcgcacgccagcagggcaagaccgtcgccgagctagccaacgactaccacaacacccagcccgcctacacctacctagctaaaggccagaacatccccaacgtcgccaaggcagccgtcagcatcgaaactgattatctgaggctggccaccgagatcagcgaccgcatgttcaccagcgacgagcaggagcctgatcatgactgacgatccgactccatccgagcagaacaaccccaccagcgacgacatgcgcttggccgaagaatgggccaacagcggccgcacagtgggagccctgccgcgccgtcaacggcctcagcgacccacaccccgcaccaccagccaaccccctgtctcgtcccctgacacaccggctccgaaaaaaccccagaagacccccaccagccagcctggccgtcaacggatcaacgtcaccgtctacgttgtgcccgaactccatgagcggctgcgctcccgatcggcggcgacgggggtgacggtctcggatctggtggtgcatgcgttagcgttcgtcgccgatcatgcgggggaggcgatcgccgatgatctgcgcgtcgagacgggccccggcatgggggccggactgttcgatgtgaccccatcgcggccagtaggggtcgccaaaacccagctgggggtgcgaatgacccgccacaacaaggatggtttggaccagctgacccggacgagtggagcccgtgaccgcagccatcttgtgtctgtcgccgtgcgcgactatctcgactccaaccctgtaaagaaaggccgacatgtccgctgatgaaactcctgccgcccggggtgggcgacgctttgatacgaccgtcaagcccaggcgccgtcccatgcttatcgccgccggtatcgccatcgtgatagtcggcgcgctcctcatcactcagttgattcgctccgcccaaaccgagcatcgcgtgct

SEQ ID NO: 303 - DNA, 2632 bp, Propionibacterium acnes
ttggtattggtaggcgatggtgtcaccggttttgttgcggatgacgtcgaagccttcgatgtcggaggggatgtcgtcggcgtcgtagacgacggtggtggtgacggggttggaggccgacatttggccgatggtcacgcgcagcatgtttttcaacgcggaggtgaggattgtcgtggcggtggggtttttgtctgcccagcgtttctcggcgatgtcgatcatgtcttggatggttttgacccatcctcggatgggatcgactttggtcagtttgatcccttcgaggaactcgatgggctgggtgatgggcccatctggtccggcttcggtgtcccagccttcgtcgatggctagtttcagttcggcggtatcgacccatgtttcgtgggtggtgccgggcacgttgggccaaaaccatcctgctcgtcctttggtgcgtttgaccggtagtaggccgatgtcgtcccaccaggatggcacggtgaagcggatgtggtagcgggccgggtgccaggggttgttggtgaacaggtcgcgggcttcggtggcgctgagcagagtggcgggtgcggcaccgatctctccggtcactgatccggcatacatgaatcggccgtcgatgtacacgaagttagggatagggccggcaggcacggtggggcgccagcccttttcgcggtcctcggggttgccgtcgtcgacgcatagttcgtagcggtgctgaggggaggtgtgttggatgagtgcgcccagttcggggtccatcggctccatgcgataggactcgggggtccgtagcttccagaggttgattccttctgctccggggcggtccatgagggcccagtcgcggtcgattctggtggcgatgatgtgggttaattcgcgccatgcccagcgggcctggattggggtgagggtctggccagggaaccattcatcagcgaccagaatgtcgaggttgcggtcggtttctttgtgggtgaaccggcctcgggcgggccgcccggacagcatgaacaggccccgcacgtgccagtcctggttgaactcgcgggtgtgagcgggggtgtcaggcagcagccaggattgaggctggtcggggatgttaccgcagacgatcaggcgtcgggcgttgtggtgtagcgcggttgttagcaggtctgacagggtcgcgtgcttggtgcgtcgtccccccagcactggcaggatctcgtttccggccgcgtcgactccccgggcggtgtcgatgtctagccacactgtttcggggtcggggggccgatgtggggcgggacggcgctgctcctggtcgtctctcatggtttcctcctttgggccagggagcggccggcgtcgagggcgttcatgcgctcgcgttgttcttcgcgtagttggtagacccggcctcgtgacactcctgctgcctcggcgatggtggtggccggcaggtggccgatggcggcagcgtcggcaaggacgtcacgccaggccaggtcaatggttcccagctgggctagagcttcgtcgcggcggcgggtggcatcagccactacggaggcccaccctgtggggtggatggtcttgacgacgattcggttgtggcggatggggccccatgcatcagcggggacttgccagccgtgattggcggcggactcggtgatcttgaggcgtcgctcaggtgcgcgggtgcgggcagtgacgtcggtgttccaggtctggactggtacccacgtcccctctcggatgcgttcgatgacgcacgtggtgacctcgtcggtgactgtgatgaccagacgataatctttcccgtctggagtggttcgatagctgggcatgtcaccctccccccatatgtcaatctaactagacatattttctagcccatctgacacattgtcaaggacaatagacctttcgtgtgaatccaccccgtcaaatgcacactcacgcctcatggcccgccgtgacgccttaacgaaaccaaaccgcttatagaaccgctccgcagcgggcccggagggcttcagttcgagggtgagaccgtgctcgtcggcccattggcagacttgtgtgaggatctgtgagccgtggccttgagtgtgggggacggcgtggacgcacatgagcatggggccgtggcggcgcgctggcggggccacgtaggctccgccatgccagtccggtgtggtctgccaacttcgccatgccgcagcgcgccaacggcgggcctcggtagccaccatgatcaccatgatgatggacagggttacgacgccgactatggccagctcaccctgaccaggccagttcccgcagatgatccagcctcccagcgcccagatgatcatggcttccacgcccgccgcaatcgggacgagtggggcagtacggatgcggcctgccatgatctcggtgatctcgctgcgatgccatgacaaggagaattcccacgactcttgaatcatgctgatgtgtgaacggcttcctcggcctcgctttgccatagcttctctagacggcgctcggctagctcgtcggggcacggcgacagcctgccgcactcggagcagaccccgaagtggcgcgagagagtgatgaccggctcgtcgggagcatgaaccga

SEQ ID NO: 304 - DNA, 2061 bp, Propionibacterium acnes; identical to SEQ ID NO: 205

SEQ ID NO: 305 - DNA, 2219 bp, Propionibacterium acnes
gctgagaaaaattttgggtccgccctgcatatcggggcctcttcataccttcaaaagtgtgaagggaatacagactcttcgactggaattaaaatggtatatggcgtgtccggtccgcacccagctccacgatgcgccatagaggagccataacttcaccaatcgtatacgatatgagtgtaggtgagcatctaccggtggccgacagtcagatacaagcatgggcggatgaagcagaagctgattatgacctcagcatgcttccgccgtctcgacgtggtcgcccaccggtggggaggggcccgggcactgtggtccctgtgcgcttcgacgcggacactctcaaggcgttgtcacaacgagcccctgacgaaggattgaccacgcgttctgacgcgatccgtgctgcggttaaccagtggctcggcctcggctcgtaaacattatcggcgcgacaaccttactgatgacgctgttggttacgccgtagagcacatcttgtactcgtgggcgctcgacgatgccgatgatcctcgttgctggatgatgattcggtgttgacccagctggcctcctcatggagctagttatcctcatctacgacgatggctatgaactcctgatccacgccatgaaagcccgccctcagtatctgagctacttcgctatctagtgttgttgggcgagttgaactcaacttttctccgacgcaagcgccaataaaaggctgatccatccgaataccaccaaacacggctgaagtgtggaacagattcagcaagacagggtgcggtgctcgggtgcgttggggagatgaggatattcaggcttctggcgggatgtggcttgatgacgtccaggatcaccggttcggttttgaaggtgccttgcattaatgtcgacagggtcgtacgactcgaggactggatcgaccagcccgttgcgtctgaagaacttcatccaccccggtggagctccggccgcgtactggtgcaacggatcattagcatgggtagcgtgagtatgccttcgatcgtggtcagtgctgtcatcatccaagattctgacgggcggcttctcactgtccgtaaacgaggcgccgaggcattcatgctgccaggcggcaagccggagcccggcgaggactcgcgtcaggcagtagtccgggaagtgcacgaagagctcggcgtcgcattgtcttccgacgacctgcgtcgggtgggagtgttcaccacgcgagcagcgaatgaggccggccatcaggtggtggcgacgattttcacccacaccccggttgcggtgagtgagccagctgctgagatcgagcagattcgttggctcgattggagtgtcgacgccctgcctgatgacctggccccgctgctggtcgaggcagtcatcccgtggctgcggcgccgtatccggtcggtcgctgtattcacgggtgcgaaggatggaaccgaccctcattatcgtgtcgaagcaaccgccttgggccggggtctcgcacacgccgggatcaccctggtttatggcggcgggaaggtcgggatgatgggtgctgttgctgatgcggccctcgctgctggcggcgctgtgatcggagtgatgccgcagcacttggtggacggggagatcgcccatcctagtctgactcacctcgaggtagtgcggactatgcatgagcgcaagcagcggatgagtgacctagctgacgcgttcgtcgcgctacccggcggcggcggaacccttgacgagctattcgaagcatggacatggcagcagctcggtgtacacagcaaacccgtggccttgtacgactcgaccttctgggcaccgctgaccgcgctactcaaccacatgaccatcgaaggcttcatccgccctgaggaccgcgcctcgctcgtgatcgccgataccatacatcagctgatggccgatcttgagggatggaccccaccaccaccgaagtggcgctcgtgacatagaacaaatgattctgactatggctcattgacatctgcgcagcggctactagctccattgacttcaaatcgggccttggccgaggctcggttcaggtggcccggaatggatccccacaaattgaatgctcatgatcgaggtgatgaacgcccactctattgtcctacgcccggttgtatccagcgagcaattgaaggtgctgcgcctgttggtcgaccaggccgagccactca

SEQ ID NO: 306 - DNA, 2218 bp, Propionibacterium acnes
caccaaccatgcatgaacgcaagatcgcctaccggccagccttcctgcgcgacgtgaagcggctcaaaaacaagcactacaacatgaacacacactcaaatgggcggtaaggtcacgaagtcgacgtggctgcctcacggatggcttcggcgagctcttggggtcgactccacatgggccagtggccggttggcagatccatcgcggtgaagttggtcaggtgcgcgacggcgctgaacatcggattgcctgctgcggccagctcgaggacctggacgctggggatagaacagcagatcaacgtggttagtacatcatggcgagcgctattggacagcgcgacccgtgcccgggccacttgcgcgggttcaggaaccgcccgtgcccggaaccggtcaaggtgctcgttgctgaggccctctaaactggcctgcttgccgagagtatcgaagtcaggaagtggcagctcagctgtttcctcaggtagatctggtgcgaaggcacctccatcgctcatgggaccggagtccacccagacgatccgatggaccaactctgggtgcctgtctacaactaggctcaccggcccgttcgcgccactgtgtcccaccaggaccgcatcgccgcccatctcgtccaggatggctgagatggcgtcagcttggtcgtcgagcgtgcgcgtagtgcgctgggtgtcctccggatcgaggccaggcagcgtcagccccacggctcgactgccagcagtgttcaataactcgactacctcgtcccaagcccaggctccgagccagtaaccaggaacgaggacgataggccgatgctggtcaggtcgcgatgttgaagtcatggagacatagttgcacagtgcgcggacaagggagtggcactatttctggcatgaatttagatctgggtgtccggtgaggcgatcagaacgcctccatgtactgtccgagtgtctaggatgcagcggacacagtcgagcagctggctcacaagtttccaggtgtccttctgcccctatgagggaagtcggctgctctcgcaacctttgagggctgctctggggtcggaaccagttacagatcgttcaagttccgggaactaccgccggtcacgctgattgattcccgggcgatctcgcttctgacgacagtggtcggtgaccgagaggcgtcctactctgaccccgctgctgcggtgagtaaatcacgggcgtcccggatccggccacccgtccaagtgccagccagcttgatcggctaggcatcgtcaaggagcgacgatgaggtgatgatgcgatgtgagcgcaccgcgaagtgaggtataaagaagccttcccgggcgcatgcgtcgcccaggaaggccaggttggcccctggacggctgaatggttgggcggatcaggctgtagcggagacgtgcagtacctcgtaggcgatggcgttggttgggctctggtctgcatcgtggctactgagttcgacgaggatgacggtccaggtggtgatgtcgacggcggtgacgcgggcgatggtggaatcagtggatgctgcaaggaagtcggcggttatgtcttcgatgcagtgggacggagcagtgctggtgggcaggggcacggtcttgacggtcaggcttcgggcagcagagtaatcggcggttccgttaacaagctggtggacggtccagtcctggatcgggtgccggccgaagtcgcgtacgatagccgagtaaccaagttcgccccagcagaactggcgcatcccctctatgtcgcgccagacgtagaagggcgcgtaggagttctggggtgcgcctttgaccttttcttggatgaggtaggccttgaactccagtccatggtagccgtccatgaggtgtccagtctggatgacgcggtcgcggatgatctgcatgtcatagtcggtgggcagggtgatctgatattgcatggcgtacatcagcggttctccttggtttcgtgggagtaggtcgtggggatgacgggttcctgccaatcgatggttgacaagtcgtcggcggcttgttggtaggtagggtggatcattggctgtttgagtgcagcgccatgccagtgtctctggccggcgtcgatccagatggattcgcccttggtcaggtgctggggtgcttgtccttcaatatggaccagggcaacgccgcccgtgacgtagaggccctgtcccttggggtg

SEQ ID NO: 307 - DNA, 578 bp, Propionibacterium acnes
ggcgtgggcggcacgcccggcgtcttccgtggcacgatcggccggatccatggcggcgcgcagctgctgttctgcagccaggcgtccaggtcacggcgggcagcatcgacacccagggcagcctcgacggcttcagggctacgacgctggccgggctggttgaccgcagaccactggtgccgggcgtcgtccagatcatggccggcggcgtcgatgagggcggtggtggcttcggcgcagcatcgcctgatccactccgaacgtgacaggccagctgtctcggcggcactgtcaatgcgcgccaggagagatttcatgggcgctcatctgtagcctccagataggcgttgatgtagcgcagagcctgatccgtcatgtcgatggcggctgcctcggcagacgacacaacgggctgtggatgataagaccacccaacatagacggcgaacatcaatttctcgacagctttcatgaggtccccggcggcaaccgcatccgcctcatcatccgaggagaaccacttcaggtctgaacggctgtacatagcccctaggtcctgatgtgggtcgaggtccttg

SEQ ID NO: 308 - DNA, 2201 bp, Propionibacterium acnes
tccgccctgcatatcggggcctcttcataccttcaaaagtgtgaagggaatacagactcttcgactggaattaaaatggtatatggcgtgtccggtccgcacccagctccacgatgcgccatagaggagccataacttcaccaatcgtatacgatatgagtgtaggtgagcatctaccggtggccgacagtcagatacaagcatgggcggatgaagcagaagctgattatgacctcagcatgcttccgccgtctcgacgtggtcgcccaccggtggggaggggcccgggcactgtggtccctgtgcgcttcgacgcggacactctcaaggcgttgtcacaacgagcccctgacgaaggattgaccacgcgttctgacgcgatccgtgctgcggttaaccagtggctcggcctcggctcgtaaacattatcggcgcgacaaccttactgatgacgctgttggttacgccgtagagcacatcttgtactcgtgggcgctcgacgatgccgatgatcctcgttgctggatgatgattcggtgttgacccagctggcctcctcatggagctagttatcctcatctacgacgatggctatgaactcctgatccacgccatgaaagcccgccctcagtatctgagctacttcgctatctagtgttgttgggcgagttgaactcaacttttctccgacgcaagcgccaataaaaggctgatccatccgaataccaccaaacacggctgaagtgtggaacagattcagcaagacagggtgcggtgctcgggtgcgttggggagatgaggatattcaggcttctggcgggatgtggcttgatgacgtccaggatcaccggttcggttttgaaggtgccttgcattaatgtcgacagggtcgtacgactcgaggactggatcgaccagcccgttgcgtctgaagaacttcatccaccccggtggagctccggccgcatactggtgcaacggatcattagcatgggtagcgtgagtatgccttcgatcgtggtcagtgctgtcatcatccaagattctgacgggcggcttctcactgtccgtaaacgaggcgccgaggcattcatgctgccaggcggcaagccggagcccggcgaggactcgcgtcaggcagtagtccgggaagtgcacgaagagctcggcgtcgcattgtcttccgacgacctgcgtcgggtgggagtgttcaccacgcgagcagcgaatgaggccggccatcaggtggtggcgacgattttcacccacaccccggttgcggtgagtgagccagctgctgagatcgagcagattcgttggctcgattggagtgtcgacgccctgcctgatgacctggccccgctgctggtcgaggcagtcatcccgtggctgcggcgccgtatccggtcggtcgctgtattcacgggtgcgaaggatggaaccgaccctcattatcgtgtcgaagcaaccgccttgggccggggtctcgcacacgccgggatcaccctggtttatggcggcgggaaggtcgggatgatgggtgctgttgctgatgcggccctcgctgctggcggcgctgtgatcggagtgatgccgcagcacttggtggacggggagatcgcccatcctagtctgactcacctcgaggtagtgcggactatgcatgagcgcaagcagcggatgagtgacctagctgacgcgttcgtcgcgctacccggcggcggcggaacccttgacgagctattcgaagcatggacatggcagcagctcggtgtacacagcaaacccgtggccttgtacgactcgaccttctgggcaccgctgaccgcgctactcaaccacatgaccatcgaaggcttcatccgccctgaggaccgcgcctcgctcgtgatcgccgataccatacatcagctgatggccgatcttgagggatggaccccaccaccaccgaagtggcgctcgtgacatagaacaaatgattctgactatggctcattgacatctgcgcagcggctactagctccattgacttcaaatcgggccttggccgaggctcggttcaggtggcccggaatggatccccacaaattgaatgctcatgatcgaggtgatgaacgcccactctattgtcctacgcccggttgtatccagcgagcaattgaaggtgctgcgcctgttggtcgaccaggccgagccactca

SEQ ID NO: 309 - DNA, 2334 bp, Propionibacterium acnes
cccgcggcgtccgctggggcgagtgcgtgtctgtcatctcatcttttatcgtcatgtttccccttgtcagaggggtctttgcaaagtgacaacgtcaggggtcttgacgacaacatcctcgacaacatcgtggcggtggtctgtgtcttgtcagttcaacgcaccggggaaagaggcaccgctgatgttcaccaccacaaacaccctcaacgatgaatgggaccagattcgcgccatcgagatcgattggcatgactgccctgaactgatgcactgcatcgacgttgatgatgtgttggccgtcattcctgccgcccccgacgccatcttgggctacctcattgcccgggctcagggcggtgacgagttggccacccgcactatcatccaagcgttcacaggcaagcttattttgatggccacggccaccaaggtgcgccgtactaatgacggcttcaatgatctgttggcgggtctgtgggagacgatcatcacttacccgttggatcgtcgccctgacaagatcgctgcgaacctcatcctcgacacgttgcaccgggttacccggttttggcgtgctgattcccccgatgaggaagaggctcacggtctgctgcccttccctgacactctcatcgccccagagcccgatgaggacgtcacagctagccaggccatcgccttggcggtggaccgcaactggattaccgaggacctagcccgcctcatgagccatatttactgtgacggtatgactggagctgatgcgggtcgtctgcatggctgcgctccagctacggtgcggtctcgatgccgtgatggtcgggccgtgttgcagcgcaacgccgagacgatcctggccgtctgctgatccctctcttgctcatgcctgccgccaccctacccctacctgctagaaacatagccatgtctccagcaacgcatctagcatatcttctagcaatttatctagctatgtatatagctgatgatctagctatcatatagctgtgtctccagcccaaatgacagcccaatggcatgcttgccacaggaaggtgcgtcagcctcccgaaatactggaaggagctttagcgtgcaggacatgaccagtcctattgaccgatccccgttcgaccgcactattgcggtgtggaaccacaaaggcggcacgttcaagacgtccgtcgtggcgaacctgggatacctgttcgccgccggtggcaacaaggtgctgctggtcgacatggacccccaagccaatctcgacatcgacttcggtatacccgcaggagaacgtgaacggggcatgggattagccgaggcgctgcgcgaggggacggcccttcccccaccacagcatctcagcgaaaacctccacctggtcagtggcggcccggccctccacgagttcaccgaccccgcatccttagcggccatcatcgaccgagtcaccaccgcacgctacgacctgctagctcaggcccttgccccgctggcctgggactatgacctcatcttcatcgactccgggcctgcccaaactctgctgtcccagaccatccttggagtagcccgctggctggtagtgcccacccgcaccgataacgcctcaatcactggcctcgtcgacgttcaagacgccatcgacggggttgcctcctgcaaccctgaccttcaactactcggcgttgtcctagccggcgtgggggcccgggccacccggatcgccgcagataaacgccacgccatcgacacagtgctgggggcaggaaccgttttcgatgcggtcatccactactccgagaaggtgtccgtgctcgcacgccagcagggcaagaccgtcgccgagctagccaacgagtaccacaacacccagcccgcctacacctacctagctaaaggccagaacatccccaacgtcgccaaggcagccgtcagcatcgaaactgattatctgaggctggccaccgagatcagcgaccgcatgttcaccagcgacgagcaggagcctgatcatgactgacgatccgactccatccgagcagaacaaccccaccagcgacgacatgcgcttggccgaagaatgggccaacagcggccgcacagtgggagccctgccgcgccgtcaacggcctcagcaacccacaccccgcaccaccagccaaccccctgtctcgtcccctgacacaccggctccgaaaaaaccccagaagacccccaccagccagcctggccgtcaacggatcaacgtcaccgtctacgttgtgcccgaactccatgagcggctgcgctcccgatcggcggcgacgggggggacggtctcggatctgg

SEQ ID NO: 310 - DNA, 2280 bp, Propionibacterium acnes
gacgccggccaccccaactactccgacccacacggtgaccccagctccggcctctgccggccactcgaccagcgacgagcacccaatccatacggataccgccgcagcggacaaggccagcgacgaggacgccctgtccccaatccaggtgggtttgaccgccagcgtcggactggtgctggtcgccggactgatcaccaccctcaaccgccgctaccggacccggttcacccgccagccccgcggcaaggccatgaccctgcccagcccggacgcccaaactgccgagatagcgctgcgcagcaccggggcgactgacactctgacgatcacctgcctcgaccaggcgctccgcgcgatcggcgcatggtgccaccactgcgggcacccgctgccacccctgctggccgcccgcgtcgatgacgaccggatcgacctgctgctatcccaggcggcccccgaccatcccgaggcggtggagctggccgccgacggatcggtgtggaccctcaccgccgaccggatcgacgacctgctagcccacaccgatgacaaccaagcggctccgtggccgtctctggtcacactgggacgcgacgacgacggcgcccacatcctcatcgacttggaagccgcaggaaccttgcacctgatcgccgatgacgaccaggtcgacgcggccctcgccgcgatcgccgtggaactggccacctgtgactggtccgacgaggtcaacgtcaccctggtcggccaggtgtgcccgggcctagaagacgcactagagtctccgaccctgacccgcgccaccgacgtggacgccctcctcaccaccctggaagctcgcgccgacgaccagcgacacatcctcaccgaaggaagccccctcgccgctcaccgagccgaccccgccatctccgacgggttcgacgccgaagtgatcctcctcgacaccgaactcaccgaagaccaccgcaaccgcctcgccagcctcgtcgaggctcttccccgcgtgtcagtcgccgcggtaacaaccagccccaccagcccagacgaatggtccctcaccctgacaggtgacccactagccgccgacctggctcccctcggctggcacatccacccccaaaccctctcccccgacctgtacaaccgcatggttgaactactcgccaactccgccgccgcagactacgaacccgccagctggtggaaccacgacgccgacgacgagcccaccaccgaccccaccaacgaggaagaatctaccccgagcaggcgagcccgcccgaatatccgcctgaccaccctgaccggcggcatcgacctatccagcgtcgacatcgacgacatcatcgacgaagccaaccaggccctcgacaacaccgaccagaccaccaaccaggttcgcgtcgacaccgaccaacccggcaccgacacccccttccccatcgacgacatcgacccgctgagctccgaccacccggtcctatccatcatcggccaccccgacatcacaggtgccactggaaccgttgggcgctccccgtggcgctgccaacagttggccctctacatcgctgagcatccgggagcatcgggggcgactatcgccgatgatttggggctatcagcgtcgacggtgcgctcgattgctacacacctgcgacactggttgggagccgacgatgccggggtggcttacatgccggcggcgacgcgcggctaccggctcgatgagcggatcgtcacagatgtggacctgatcgacgctgctgtggccggggcaggcattaacaccgctgagacggccacactggtggccattttgaagctgggccgcggacgggtcttcgctggggttcctgactcggaacttcgccagttcagggcgtcgatgtaccacgtggaggcccgcatcgtcgatgctgccctccaagtgacagaccgggccctggaagccggagacttggggctggcccggtgggcgctgacccaagggctactggtgtctcccgatcatgaggacctggtcgccggttgtctgcgcaccgaataccaggccggcaacatggacaaggtcgccgagctagttgatcacctgtcggctaccgcacgccgactgggcgtcgacctcaacgaggacaccacccggatcatcgatacggtcacccacgccgacaggagagcatcatgatctcccctgcactcatctccgtcaggaaggtccctatgcaccattatcgtcttggtatcggcactgccctcatcgccgtagcagcc

SEQ ID NO: 311 - DNA, 594 bp, Propionibacterium acnes
gctgagaaaaattttgggtccgccctgcatatcggggcctcttcataccttcaaaagtgtgaagggaatacagactcttcgactggaattaaaatggtatatggcgtgtccggtccgcacccagctccacgatgcgccatagaggagccataacttcaccaatcgtatacgattggagtgtaggtgagcatctaccggtggccgacagtcagatacaagcatgggcggatgaagcagaagctgattatgacctcagcatgcttccgccgtctcgacgtggtcgcccaccggtggggaggggcccgggcactgtggtccctgtgcgcttcgacgcggacactctcaaggcgttgtcacaacgagcccctgacgaaggattgaccacgcgttctgacgcgatccgtgctgcggtttaaccagtggctcggcctcggctcgtaaacattatcggcgcgacaaccttactgatgacgctgttggttacgccgtagagcacatcttgtactcgtgggcgctcgacgatgccgatgatcctcgttgctggatgatgattcggtgttgacccagctggcctcctcatggagctagttatcc

SEQ ID NO: 312 - DNA, 2594 bp, Propionibacterium acnes
ttggtattggtaggcgatggtgtcaccggttttgttgcggatgacgtcgaagccttcgatgtcggaggggatgtcgtcggcgtcgtagacgacggtggtggtgacggggttggaggccgacatttggccgatggtcacgcgcagcatgtttttcaacgcggaggtgaggattgtcgtggcggtggggtttttgtctgcccagcgtttctcggcgatgtcgatcatgtcttggatggttttgacccatcctcggatgggatcgactttggtcagtttgatcccttcgaggaactcgatgggctgggtgatgggcccatctggtccggcttcggtgtcccagccttcgtcgatggctagtttcagttcggcggtatcgacccatgtttcgtgggtggtgccgggcacgttgggccaaaaccatcctgctcgtcctttggtgcgtttgaccggtagtaggccgatgtcgtcccaccaggatggcacggtgaagcggatgtggtagcgggccgggtgccaggggttgttggtgaacaggtcgcgggcttcggtggcgctgagcagagtggcgggtgcggcaccgatctctccggtcactgatccggcatacatgaatcggccgtcgatgtacacgaagttagggatagggccggcaggcacggtggggcgccagcccttttcgcggtcctcggggttgccgtcgtcgacgcatagttcgtagcggtgctgaggggaggtgtgttggatgagtgcgcccagttcggggtccatcggctccatgcgataggactcgggggtccgtagcttccagaggttgattccttctgctccggggcggtccatgagggcccagtcgcggtcgattctggtggcgatgatgtgggttaattcgcgccatgcccagcgggcctggattggggtgagggtctggccagggaaccattcatcagcgaccagaatgtcgaggttgcggtcggtttctttgtgggtgaaccggcctcgggcgggccgcccggacagcatgaacaggccccgcacgtgccagtcctggttgaactcgcgggtgtgagcgggggtgtcaggcagcagccaggattgaggctggtcggggatgttaccgcagacgatcaggcgtcgggcgttgtggtgtagcgcggttgttagcaggtctgacagggtcgcgtgcttggtgcgtcgtccccccagcactggcaggatctcgtttccggccgcgtcgactccccgggcggtgtcgatgtctagccacactgtttcggggtcgggggccgatgtggggcgggacggcgctgctcctggtcgtctctcatggtttcctcctttgggccagggagcggccggcgtcgagggcgttcatgcgctcgcgttgttcttcgcgtagttggtagacccggcctcgtgacactcctgctgcctcggcgatggtggtggccggcaggtggccgatggcggcagcgtcggcaaggacgtcacgccaggccaggtcaatggttcccagctgggctagagcttcgtcgcggcggcgggtggcatcagccactacggaggcccaccctgtggggtggatggtcttgacgacgattcggttgtggcggatggggccccatgcatcagcggggacttgccagccgtgattggcggcggactcggtgatcttgaggcgtcgctcaggtgcgcgggtgcgggcagtgacgtcggtgttccaggtctggactggtacccacgtcccctctcggatgcgttcgatgacgcacgtggtgacctcgtcggtgactgtgatgaccagacgataatctttcccgtctggggtggttcggtagctgggcatgtcaccctcccctatctgtcaaatgagctagacacagtgtctatttaatttgacgcaaagtcaagtgtgctagacgcctttgtgtggatccgcccgcccagacaggcactcacgtctcatgacccgccgcgacgtcttaacgaaaccaaaccgcttatagaaccgctccgcagcgggcccggagggcttcagttcgagggtgagaccgtgctcgtcggcccattggcagacttgtgtgaggatctgtgagccgtggccttgagtgtgggggacggcgtggacgcacatgagcatggggccgtggcggcgcgctggcggggccacgtaggctccgccatgccagtccggtgtggtctgccagcttcgccatgtcgcggtacgccagtggtgggcttcgagggccaccatgatcaccgcgacgacgacgagcgttgcggccccgatcatggccagctcaccctgaccaggccagttcccgcagatgatccagtctcttaacgcccagatgatcgcggcttccacgcctgctgcgatcgggatgagcaaggcagaacgaaggtgtcctgccatgatctcggtgatctcgctgcgatgccatgacaaggagaattcccacgactcttgaatcatgctgatgtgtgaacggcttcttcggcttcgccctgccatagtttctccaaacgacgctcagccagctcgtcgggacacggcgacagcctgccgcactcggagcagaccccgaagtggcgcg

SEQ ID NO: 313 - DNA, 2383 bp, Propionibacterium acnes
tggttgtcgaccacaacgatggttcccggtcaacgctgccgccggtggccgactcggatgccgagctggaatcccagatcgcccggatggcgaggaatgcgaccccgcggcgagccttcgacgccgatcacaccgatgtgacgatcatgcaccaacagaagttccgtatccacgcgatctcagcggaagtgtcattgcaaccgtcggtggtcatccgccaacatttgctcacccaaatcagtctgggggacctgtcacatcgcggaatgatgccggtggaagtggcccggttcctcgatgaggcggtacaagctggcaagtccatcgtggtcgccggcgagcagggtgcaggcaagacgacgtttttacgagcgttgatccacgccattccgatgcgggagcggttcgccacgttggagaccgatcaggagttgttcgctcatctgatgcctggccgggaaaacacgctggtgctgttcgcccgtgatggtaacggcgaggtggatccggcgactggcacccagcacggcgctatcgagatcgcccagctgattcctcctagcctgcgccaggcgttaactagggtcattgtcggtgaggtgcgcggcaatgaggcctcggccatgttccaggccatgcagtcgggtacaggcaccatgagcagtatccactccccgcgagcctctgaggtgccgtcccggctagcccaaatgatttcgatgggcccggtctacgatctggatcaggccatgctgcagatcggtcattcgatcgactacatcgtctttgttcgtaagcgtgacctgcctgatgggagccggctgcgatttgttgagcagatccgttcagtctcgcctggtgattcgacaactcccagtcttggcgaggtgtacacggctgactcgtggacaggccagccgcttacgccactcatgcccggatcggccgccgacgagctgtctcacttcgcccgagacctggattactgcgaggcccactcatgaacactcccgcactaaccagcgccctcatcgtgaccgggttggggctgatcctggccatcgacgggctggtcccggcgccgcctcgacctggggccccgctgagcccggaccaaaggtgggccaggctcacccaccgtcccacaggagcggccgggcgccgccgggacctgcgctgggggctggctgttctcgtcggcgtcgtgctgtttgtgctcaccgggtgggtcgctgcgctggcgttgggccccatcatcgtgctgctggcccccaccctgctgggggcggccccaccaaccgacatcccgctgatggaggcgctggatcggtgggtgcgtcaggtcgctgcggtgctgccacaggggcgagacatcatcacagcggtgcggatctcacggccgcgggccccgaagctgatcgccgggtcggtggatcaactggtgtcccggttggatggccgtatggagccgagggaggcgttccagcggatggccgacgagctggactcggctgaggctgacgcggtgctggcctcactagcgttggcggccactcacccgcggggagcctcgacaacgttgaaggctattgctggcaacatccaacagcggttgaaagtgctgcggcaggtggaggctgagcggtctaagccgcgtaactcggtgcgccagatcacactggtcacgatcgccatgttcggggggctgctcgtgatcggacggtcgtttctggccccgctggcgacccctcccggtcaggtgctggtggccgtggcggtggtcatgtatgtcatcgcactagtgcagatgtatcggatggcgcggccccgtcgacgcacccggatcatggtcaggaggacccgatgaccattactgctttgtccctgctggccggggccatcgtcactgtcggactgctggtcatcgtggcagcgttccgcccagccccaggccctgacctggttgccgctctggaggtggtgtcgggtcgcacctcaagcgtcgccgagaacgtcgaccagacccggatcgggcggataggtcgcagcgtgacccgcacattccatgtgtcggtgtccccggccatgcgggccgcactgcgactccaaggcacgacccccgaagcgttctacggtcgacgcctgatctgcgcactgatcggggcgatcctgccgtggctgctcaacgcggtagccatcgcggtaggggcgaattccccgaacctactcatcccttcggcgctgtgtgtggcgttagctggcgctggatggatgctgccggcagcacggttgaaggctgcggccgggcccaccaacgatgactcgttcgaagcgctgctggtattcatcgatttggtcgtgctggaacggctcgccaacgaaa

SEQ ID NO: 314 - DNA, 2238 bp, Propionibacterium acnes
gacgccggccaccccaactactccgacccacacggtgaccccagctccggcctctgccggccactcgaccagcgacgagcacccaatccatacggataccgccacagcggacaaggccagcgacgaggacgccctgtccccaatccaggtgggcttgaccgccagcgtcggactggtgctggtcgccggactgatcaccaccctcaaccgccgctaccggacccggttcacccgccagccccgcggcaaggccatgaccctgcccagcccggacgcccaaactgccgagatagcgctgcgcagcaccggggcgactgacactctgacgatcacctgcctcgaccaggcgctccgcgcgatcggcgcatggtgccaccactgcgggcacccgctgccacccctgctggccgcccgcgtcgatgacgaccggatcgacctgctgctatcccaggcggcccccgaccatcccgaggcggtggagctggccgccgacggatcggtgtggaccctcaccgccgaccggatcgacgacctgctagcccacaccgatgacaaccaagcggctccgtggccgtctctggtcacactgggacgcgacgacgacggcgcccacatcctcatcgacttggaagccgcaggaaccttgcacctgatcgccgatgacgaccaggtcgacgcggccctcgccgcgatcgccgtggaactggccacctgtgactggtccgacgaggtcaacgtcaccctggtcggccaggtgtgcccgggcctagaagacgcactagagtctccgaccctgacccgcgccaccgacgtggacgccctcctcaccaccctggaagctcgcgccgacgaccagcgacacatcctcaccgaaggaagccccctcgccgctcaccgagccgaccccgccatctccgacgggttcgacgccgaagtgatcctcctcgacaccgaactcaccgaagaccaccgcaaccgcctcgccagcctcgtcgaggctcttccccgcgtgtcagtcgccgcggtaacaaccagccccaccagcccagacgaatggtccctcaccctgacaggtgacccactagccgccgacgtggctcccctcggctggcacatccacccccaaaccctctcccccgacctgtacaaccgcatggttgaactactcgccaactccgccgccgcagactacgaacccgccagctggtggaaccacgacgccgacgacgagcccaccaccgaccccaccaacgaggaagaatctaccccgagcaggcgagcccgcccgaatatccgcctgaccaccctgaccggcggcatcgacctatccagcgtcgacatcgacgacatcatcgacgaagccaaccaggccctcgacaacaccgaccaggccaccaaccaggttcgtgtcgacaccgaccaacccggcaccgacacccccttccccatcgacgacatcgacccgctgagctccgaccatccggtcctatccatcatcggccaccccgacatcacaggtgccactggaaccgttgggcgctccccgtggcgctgccaacagttggccctctacatcgctgagcatccgggggtatcgggggcgactatcgccgatgatttggggctatcagcgtcgacggtgcgctcgattgctacacacctgcgacactggttgggagccgacgatgccggggtggcttacatgccggcggcgacgcgcggctaccggctcgatgagcggatcgtcacagatgtggacctgatcgacgctgctgtggccggggcaggcattaacaccgctgagacggccacactggtggccattttgaagctgggccgcggacgggtcttcgctggggttcctgactcggaacttcgccagttcagggcgtcgatgtaccacgtggaggcccgcatcgttgatgcggctcttcaggtgacggatcgggctctggaagccggggacttggggctggcccggtgggcgttgacccaagggctactggtgtctcccgatcatgaggacctggtcgccggttgtctgcgcaccgagtaccaggccggcaacatggacaaggtttccgagctggtcgatcacctgtcggctaccgcacgacgcctgggcgtcgatttgagcgccgacaccacccggatcatcgatacggtcacccacgccgacaggagagcgtcatgatctcccctgcactcatctccgtcaggaaggttcctatgcaccat

SEQ ID NO: 315 - DNA, 2099 bp, Propionibacterium acnes
gacgccggccaccccaactactccgacccacacggtgaccccagctccggcctctgccggccactcgaccagcgacgagcacccactccatacggataccgccgcagcggacaaggccagcaacgaggacgccctgtccccaatccaggtgggtttgaccgccagcgtcggactggtgctggtcgccggactgatcaccaccctcaaccgccgctaccggacccggttcacccgccagccccgcggcaaggccatgaccctgcccagcccggacgcccaaactgccgagatagcgctgcgcagcaccggggcgactgacactctgacgatcacctgcctcgaccaggcgctccgcgcgatcggcgcatggtgccaccactgcgggcacccgctgccacccctgctggccgcccgcgtcgatgacgaccggatcgacctgctgctatcccaggcggcccccgaccatcccgaggcggtggagctggccgccgacggatcggtgtggaccctcaccgccgaccggatcgacgacctgctagcccacaccgatgacaaccaagcggctccgtggccgtctctggtcacactgggacgcgacgacgacggcgcccacatcctcatcgacttggaagccgcaggaaccttgcacctgatcgccgatgacgaccaggtcgacgcggccctcgccgcgatcgccgtggaactggccacctgcgactggtccgacgaagtcaacgtcaccctcgtcggccaggtgtgcccgggcctagaagacgcactagagtctccgaccctgacccgcgccaccgacgtggacaccctcctcaccaccctagaagctcgcgccgacgaccagcgacacatcctcaccgaaggaaaccccctcgccgctcaccgagccgaccccgccatctccgacgggttcgacgccgaagtgatcctcctcgacaccgaactcaccgaagaccaccgcaaccgcctcgccagcctcgtcgaggctcttccccgcgtgtcagtcgccgcggtaacaaccagccccaccagcccagacgaatggtccctcaccctgacaggtgacccactagccgccgacctggctcccctcggctggcacatccacccccaaaccctctcccccgacctgtacaaccgcatggttgaactactcgccaactccgccgccgcagactacgaacccgccagctggtggaaccacgacgccgacgacgagcccaccaccgaccccaccaacgaggaagaatctaccccgagcaggcgagcccgcccgaatatccgcctgaccaccctgaccggcggcatcgacctatccagcgtcgacatcgacgacatcatcgacgaagccaaccaggccctcgacaacaccgaccagaccaccaaccagaccaccaaccaggttcgcgtcgacaccgaccaacccggcaccgacacccccttccccatcgacgacatcgacccgctgagctccgaccacccggtcctatccatcatcggccaccccgacatcacaggtgccgctggaaccgttgggcgctccccgtggcgctgccaacagttggccctctacatcgctgagcatccgggagcatcgggggcgactatcgccgatgatttggggctatcagcgtcgacggtgcgctcgattgctacacacctgcgacactggttgggagccgacgatgccggggtggcttacatgccggcggcgacgcgcggctaccggctcgatgagcggatcgtcacagatgtggacctgatcgacgctgctgtggccggggcaggcattaacaccgctgagacggccacactggtggccattttgaagctgggccgcggacgggtcttcgctggggttcctgactcggaacttcgccagttcagggcgtcgatgtaccacgtggaggcccgcatcgtcgatgctgccctccaagtgacagaccgggccctggaagccggagacctggggctggcccggtgggcgctgacccaagggctactggtgtctcccgatcatgaggacctggtcgccggttgtctgcgcaccgaataccaggccggcaacatggacaaggttgccgagc

SEQ ID NO: 316 - DNA, 2126 bp, Propionibacterium acnes
tgggctgtagaggaggtcgatgtcgcgggcagggtcgtcgggttcttcggttacctcgggtggggtcgatctggctgtctcggtgtcgtcggccaggtcggctcccaggatgcgttcccattcggggctggttttcttgcccgctgaggccatcgtctcgtcgatctgttcgtcagtgggccacacaaatttctttttggtccaggtcgtggtgtcgggtcgcagctgatccagcagttccaggtcttgcggggagtgggccttgcgggggtcgggggtgtagaagaattggacttccttgggggctgattcgccggataggtaggtgccgcggccgcgtttgccgaacgggattcccacgccgacgtgttcggagccgaacatcatgcgggctccgtcagcggacaggggtccggtggcggcacgcccggagaagttgtctcggatttcgccgcccaggaactcggcgtcggggcgttgggtccccagatcgacgtggatacggcaggcggctgccatgcgcagcagggagccgatccagccgaaaacggggcattctccgggcatcccagagaccttgatcgttgaccaccagtttttcgcgttgccgtagaactggcggtactcgtcgatgaggaccagcacgcgggtgaagtcggtctcgcgggccccttcttcttcgatgcggcggtagcggtcctccatgagagaccacagccagtggatgagggcgacctggtcggggacggtagtggcgaccatctcgatgttgggccactcccgcaggcccaggtactcgatgcgtttagggtcgatgacgaagacgcgccagttgcggcgggcaccctcgacggcgtcgccgatcatggacaccgtttttccggtacgggtgcggccggccttgagctggtgggccatgacaccggagatgtcccagaaacaggtgttgccgtcctcgtcgacggcctgggggattttctcccagtctggggagtctgggcccggaagggccacgggtcggggcaccatcgagggcagggggtggcggcgggtgacggtgatggtgtcgtgttccaggtcgaagtcgctgcgccactggccgagcatcatcgccgaggtcaccgcggccaggcgcaattggatgttcgggctggacaaatgggcgccacgttggtggtgaatggtgaagccgtccaggttcccccgatcggttttccaggaatcgacggtgaccgccgacccatagatctgagtggctacttctttagcccgttccttgtctcggtccagatcggttttgtcagggtcaggggtcggggcgcggtattgcaggacgaaccggcccgccgggatcgttgcggatgtcaccgtgaactctgccggcgaccaggcagccgcggccgcctgggtgagggccattggcatggtctcgacggcagcctcctcgggggggatggtgagggtcaggcgtcgcggatgcgtcttcttgcgattccatgtgactttctgcctcaccggcaccttcgccgccgactgaatggctaggcgagctgattcggcagtttcggtacgccggccagcgcgtagcgcccgtcgtgcgtgaaggctgcccaccacagcacagcccatacacggcagccaccagcgcggatcagcggctgctgcatagcccccggtagctagtaccgcacctgaccagccggccgcgatacttttccacgccggtttcgcaccaacagtcggggcagacgctggccgcttcgagaccgaggagggacgagacaagggagtgctggtcatgccgcggcctccttgtggcaggtcatttcacaggcatgccggccagcgatgatgccgtggcgcaccgccccggtagccgcatagaccgcgcacaactcaaacacggggcacccatcgcaggccgccgggttcatgctttctttgtcccacgatggtgggtcatcggtgcacggcacggccaggccatcctgttgagcggcgctgatagcggtgaataggcgcagctgggcgcgaacttggtctggggtcaggttgacggtgcgggctacacgcatggggttccttcctcttcaccagtgaaggttccctagacccggccgatgtgc

SEQ ID NO: 317 - DNA, 1956 bp, Propionibacterium acnes
ccgccgtctcgacgtggtcgcccaccggtggggaggggcccgggcactgtggtccctgtgcgcttcgacgcggacactctcaaggcgttgtcacaacgagcccatgacgaaggattgaccacgcgttctgacgcgatccgtgctgcggttaaccagtggctcggcctcggctcgtaaacattatcggcgcgacaaccttactgatgacgctgttggttacgccgtagagcacatcttgtactcgtgggcgctcgacgatgctgatgatcctcgttgctggatgatgattcggtgttgacccagctggcctcctcatggagctagttatcctcatctacgacgatggctatgaactcctgatccacgccatgaaagcccgccctcagtatctgagctacttcgctatctagtgttgttgggcgagttgaactcaacttttctccgacgcaagcgccaataaaaggctgatccatccgaataccaccaaacacggctgaagtgtggaacagattcagcaagacagggtgcggtgctcgggtgcgttggggagatgaggatattcaggcttctggcgggatgtggcttgatgacgtccaggatcaccggttcggttttgaaggtgccttgcattaatgtcgacagggtcgtacgactcgaggactggatcgaccagcccgttgcgtctgaagaacttcatccaccccggtggagctccggccgcgtactggtgcaacggatcattagcatgggtagcgtgagtatgccttcgatcgtggtcagtgctgtcatcatccaagattctgacgggcggcttctcactgtccgtaaacgaggcgccgaggcattcatgctgccaggcggcaagccggagcccggcgagaactcgcgtcaggcagtagtccgggaagtgcacgaagagctcggcgtcgcattgtcttccgacgacctgcgtcgggtgggagtgttcaccacgcgagcagcgaatgaggccggccatcaggtggtggcgacgattttcacccacaccccggttgcggtgagtgagccagctgctgagatcgagcagattcgttggctcgattggagtgtcgacgccctgcctgatgacctggccccgctgctggtcgaggcagtcatcccgtggctgcggcgccgtatccggtcggtcgctgtattcacgggtgcgaaggatggaaccgaccctcattatcgtgtcgaagcaaccgccttgggccggggtctcgcacacgccgggatcaccctggtttatggcggcgggaaggtcgggatgatgggtgctgttgctgatgcggccctcgctgctggcggcgctgtgatcggagtgatgccgcagcacttggtggacggggagatcgcccatcctagtctgactcacctcgaggtagtgcggactatgcatgagcgcaagcagcggatgagtgacctagctgacgcgttcgtcgcgctacccggcggcggcggaacccttgacgagctattcgaagcatggacatggcagcagctcggtgtacacagcaaacccgtggccttgtacgactcgaccttctgggcaccgctgaccgcgctactcaaccacatgaccatcgaaggcttcatccgccctgaggaccgcgcctcgctcgtgatcgccgataccatacatcagctgatggccgatcttgagggatggaccccaccaccaccgaagtggcgctcgtgacatagaacaaatgattctgactatggctcattgacatctgcgcagcggctactagctccattgacttcaaatcgggccttggccgaggctcggttcaggtggcccggaatggatccccacaaattgaatgctcatgatcgaggtgatgaacgcccactctattgtcctacgcccggttgtatccagcgagcaattgaaggtgctgcgcctgttggtcgaccaggccgagccactca

SEQ ID NO: 318 - DNA, 2383 bp, Propionibacterium acnes
ttggtattggtaggcgatggtgtcaccggttttgttgcggatgacgtcgaagccttcgatgtcggaggggatgtcgtcggcgtcgtagacgacggtggtggtgacggggttggaggccgacatttggccgatggtcacgcgcagcatgtttttcaacgcggaggtgaggattgtcgtggcggtggggtttttgtctgcccagcgtttctcggcgatgtcgatcatgtcttggatggttttgacccatcctcggatgggatcgactttggtcagtttgatcccttcgaggaactcgatgggctgggtgatgggcccatctggtccggcttcggtgtcccagccttcgtcgatggctagtttcagttcggcggtatcgacccatgtttcgtgggtggtgccgggcacgttgggccaaaaccatcctgctcgtcctttggtgcgtttgaccggtagtaggccgatgtcgtcccaccaggatggcacggtgaagcggatgtggtagcgggccgggtgccaggggttgttggtgaacaggtcgcgggcttcggtggcgctgagcagagtggcgggtgcggcaccgatctctccggtcactgatccggcatacatgaatcggccgtcgatgtacacgaagttagggatagggccggcaggcacggtggggcgccagcccttttcgcggtcctcggggttgccgtcgtcgacgcatagttcgtagcggtgctgaggggaggtgtgttggatgagtgcgcccagttcggggtccatcggctccatgcgataggactcgggggtccgtagcttccagaggttgattccttctgctccggggcggtccatgagggcccagtcgcggtcgattctggtggcgatgatgtgggttaattcgcgccatgcccagcgggcctggattggggtgagggtctggccagggaaccattcatcagcgaccagaatgtcgaggttgcggtcggtttctttgtgggtgaaccggcctcgggcgggccgcccggacagcatgaacaggccccgcacgtgccagtcctggttgaactcgcgggtgtgagcgggggtgtcaggcagcagccaggattgaggctggtcggggatgttaccgcagacgatcaggcgtcgggcgttgtggtgtagcgcggttgttagcaggtctgacagggtcgcgtgcttggtgcgtcgtccccccagcactggcaggatctcgtttccggccgcgtcgactccccgggcggtgtcgatgtctagccacactgtttcggggtcggggggccgatgtggggcgggacggcgctgctcctggtcgtctctcatggtttcctcctttgggccagggagcggccggcgtcgagggcgttcatgcgctcgcgttgttcttcgcgtagttggtagacccggcctcgtgacactcctgctgcctcggcgatggtggtggccggcaggtggccgatggcggcagcgtcggcaaggacgtcacgccaggccaggtcaatggttcccagctgggctagagcttcgtcgcggcggcgggtggcatcagccactacggaggcccaccctgtggggtggatggtcttgacgacgattcggttgtggcggatggggccccatgcatcagcggggacttgccagccgtgattggcggcggactcggtgatcttgaggcgtcgctcaggtgcgcgggtgcgggcagtgacgtcggtgttccaggtctggactggtacccacgtcccctctcgggcgcgttcgatgacgcacgtggtgacctcgtcggtaaccgtgatgaccagacgataatctttcccgtctggggtggttcggtagctgggcatgtcaccctcccctatctgtcaaatgagctagacacagtgtctatttaatttgacgcaaagtcaagtgtgctagacgcctttgtgtggatccgcccgcccagacaggcactcacgtctcatgacccgccgcgacgtcttaacgaaaccaaaccgcttatagaaccgctccgcagcgggcccggagggcttcagttcgagggtgagaccgtgctggtcggcccattggcagacttgtgtgaggatctgtgagccgtggccttgagtgtgggggacggcgtggacgcacatgagcatggggccgtggcggcgcgctggcggggccacgtaggctccgccatgccagtccggtgtggtctgccagcttcgccatgtcgcggtacgccagtggtgggcttcgagggccaccatgatcaccgcgacgacgacgagcgttgcggccccgatcatggccagctcaccctgaccaggccagttcccgcagatgatccagtctcttaacgcccagatgatcgcggcttccacgcctgctgcgatcggga

SEQ ID NO: 319 - DNA, 718 bp, Propionibacterium acnes
ccggggccctgctgctggtgtgggacgtcaccgttttgaccgggcccactctcggccaccgcgtgcgtcctctcagtaaggacgccgagctgactgcccggcgctggctcgaccaggtcgccgacaaccccggcttcctcgacacccttatcgaggccgcccgcatcaccgatggatggcatcacgcgacgcctccgcacattcaggccccttaccggacccttcatcagtgaacggaggtacaacgacatgaccagcgacattgacattgaccggacccacaaacccgacgaccgcgccgaggctcctctttaccggtcctgggccaggagactcgtgcacgtctccgggatgccctggcgtatcgtcgccgccttggccggggtctcccccacctccatgcaccggcttctattcggccgcaacggtcgacccgtggaatggatcggcatcaatgatgctcgcgccctgatggatatcggcatcgatgatctcgcctcagcgtccaccgaccgtatcccggcccgcgaatcccgcgagctgttggtagccctgcacaccctcggctggaccgatgagcatctaagccgctggctgaccagtcccgacctcgacctggccaccacccccaaggccctctacgtcacccggctatccgccgcccgcatccaggccacctacgacatgctcatcagccagcccgtccgccgctgcggcc

SEQ ID NO: 320 - DNA, 2014 bp, Propionibacterium acnes
ccggagtatctggacaaggccgtgctcactgcgttgtatcccgatgggttgcccttcgacgaggacaccgaggagccgggcgagaatgccgggcaggaggagcttgcgatgactggatgagcccgaacatggttgaaggccgccccgccaggcgaccttcaatcaatggtttcggttgtcagctgcagccacccttgccaggtgctgtggttcttctccagaggaggagggaccgccatgaagacccagaagatctagaagatccaaaagaaccggtttcggctgttgcttcggtcttcatggtagctgatagcccgcgtcgttggaagtgcgacgacgccgatcctcatcggtatcgcaccctgttccagggtcgagaatgtgaaggattaacaaccatgacaagtcatgagacgccctccctgagggcgtcatgaccgctttaattcaagctctgccgacagctgaactgtctgctggacctggtgctagcagtccagctagaccctctgctgagggcttcatcaagattcatcacgaccttattagtgcgggcgtgtcgggtaacgcgatggcgttgttcgtcgcgttacgtaaccagcccggctgtgatcagtggacccgtcactcgtacctgcggctagcccaatggtgcggctgggatgggctgtcggaggcggcgggctgtaagcgggtgcagcgggccgctgctgagctcgctagcggtggttggctggaatcgcgggtcggccatgatcgtcgcaccgctaagacgctggtgtggcatcggttgaccagccccgacaccgaccgctgggagcaattgccgcggattgtgtgggcgaggatctgccagatcgccggggagacgtcgggagagtgggtgaggcattggctggtgtggcggatgctggccggtcgtactggtgtggctcaggcccctacgtccatcgtggctcggttcctgggctgttcttcgcgccaggtctctcatatccgtggggctctcgttgatgccggtctgctcggctgtgacgaggtctcgggggcggcgagccgggtgtggttcccctcgatggccgaggagtgtgcagcggatcgtgaggtggtcgatggggccgtcgtcgatgctgaggtgggctctggtgaaggtgtcgaggagggcggggaacccctgtcgattttgtccacccacccctgtcgattttgtccacccacccctgtcgattttgtccgccaagtattagacaaaccattagacagtgaattagaccctgggtcgcgtcagcgtgttagctcaccaacgcgcgcgcgtgcggcggccgagccgccgaagccaaagaaacccacaccaccaacgcctgaaccagcagcccccgcttcagacagtcctgtgtcagcgcacgctgatgaggctgccgagttggcgtggcagttcgtggggtggtgtcctcagctggtaggggcaccgaagaaggtgcgtggccagctccgtcagctggtcgctgccgagatccgccggaatccgggctggctggatgcgccagcgttggaggttgttgcccagcgggtacgtgctgaaggtgcgctgggggtccagcactgcgagattgtgcgagccgagctgcacggggtgatcgccgaccagaaggccgcccccgcccgccccgacgccctgcacgcgcgggagcccaagtggtgggacgacgtgtactacgaaggaaacacaaccgtgtggacgtacgactctgacgaaaccagtgacgacgacgaggcgtggaaccggtcgcaggtatgtcatgttgctgagcgtgacgacatggctggcgggattgctaccaacctgctggcctcccacgctgatgatccgatggcctggctgactcgccgtcaaaccatgctgatggctcgtttcccccacgcccagaacgaggtcaccgcgatgtgccaaatcgtgcgcaccgccctggaggccgacctggccgccggaacccggtgggaggaccgatgaggg

SEQ ID NO: 321 - DNA, 1950 bp, Propionibacterium acnes
tcggtgtccccggccatgcgggccgcactgcgactccaaggcacgacccccgaagcgttctacggtcgacgcctgatctgcgcactgatcggggcgatcctgccgtggctgctcaacgcggtagccatcgcggtaggggcgaattccccgaacctactcatcccttcggcgctgtgtgtggcgttagctggcgctggatggatgctgccggcagcacggttgaaggctgcggccgggcccaccaacgatgactcgttcgaagcgctgctggtattcatcgatttggtcgtgctggaacggctcgccaacgaaacctccgtcgacgcgctcaccaatgcggcaaacatgtcggactcgccgctattcgtccagatccgtcaagtcctcaaccgtgcctccctggaaaacgtcgacccgtggaacgggctagaccggctagccgaggacatcaaactgcccgaactcaccgatgtggtctccatcgcccgcctccaaaacgaaggcgcctccctcgtcgacagtttccgggcccgagtcgccgagttacgcgacgcctacctgctgcgcctgcaacaagaatccaccgccatcacccagcggcttggtttgtggacgatcctgcaagccggctcggtcatgctcatcttgctgggggcggccgccctcacactcatcacagccggataaaccgacaccgtgtcgagcccccatatgggccgcgaacctttcataatgatgcctgtaagcaccacaatattgatcacaacctaacaatgaaggagaaatcatgatgaccgatctcgacctggctaaaaaacagatcacctggctggcggcgcacctgcgttcccggatcgttgacgagcgtggcggtggtagctctaccgtggagacactgatttggattggtgtcatcgtggcgctggtgattggtgtgggcgtcggggtgacggcctatatcaggtcgaagatgcctcactgacgacgatgcgtagcaggttcacaactgatcagcgtggcggtggtagcgcgtcggtggggatgctcctgctgatgcctgcgatcatgctgctggcattcggtgggatcgaggtcgggatgtggtgtcacgcccatcagtcgaccatcgcggcagcccaaagcgccgcggaagctcagcgtgtcgtccatccggtcccggggtcggcacaggaggcagcctcgcagatcactagtcatggcggggtgcgtgatacccggatatcggtcagtgatgacggggccactgtcacggtgaccgtggtgggccgggccccatcgatgctggggctgcatcttcctgctgtgtcgtcgacagcgtcgatgcccaaggagcgcctgtcgtgaggcgaagtgagcgcggcggagcaagtctaagcgtcgaggtgctcatgtgggcgccgatcgcgctggtgatcatcgggtttgttgtgggtatcggccggatgtcgatggcccaggacgcggtgagtggcgcggcgggtgctgcggcccgtgcggcgtcgttggagcgtgatggacagtcggctcagtctgcggcgcagcaggcggcgtcggcgaacctgtcgtccggtgggctggcatgtgcgccgagtgtgagcgtggacacgtcagtgtttgcccgtcctgccgggcaggcgggcacggttcacgccacggtcacgtgtgtcacctcgctgggtcttggattcgggtcccggacggtgcacgcaacggggtctgccccggtagacacctatcgggaaaggagaggctgagatggcccgcgatgagcgtggtggcggctcggtgtcggtgtggatgctgctcatggtgccggtgattctggtcatggccggcctggtttttgacgggtcccgtcagatatcggcaacccaggcggcccaggacgcggcggttgcggcatcccgcgccggaactgatgcggcagcg

SEQ ID NO: 322 - DNA, 2060 bp, Propionibacterium acnes
gcgagccacgaccatcgccaagctgaatggagagcgagcatgagcaccacccctgccgggttcgacttcgacgctctggccgagtgggccgagagcgatgaggcgacccacaccccgcaaaccagccccgtgttccggggcaaggacgccgcgcgcgccagccgcgcattcctcggccgaggacggcccaccctcggcgcggaccacgccaccggcgagggccggtcgccccgccgtcaggtacggctcgacgcacgcaccaacgcgcgactcgacgcctacgcagccgcaaccggcaccagcgcctcccagatcatccgcgacgccctcgctgactacctgcccgcctgatcccaccccaatccactcgggcgcctgtcagtgccccctcttctgggtggtggtccggggcgtcaccgccccggaccagttggggagtcatctcagttgaaataagcgattagtgatacgcccctcctgctttccggtgctgtcatgagcgtctgacaacagcgacacctcggggcagccgacggacagtcctctggctgccgctctgatcccatgcccacggcacgaaggtgtcggacagctcggtctcatcatgtgcccaaatagcgtcgtgggcctgtcgccaagcttctcgggagccccacacgggcacgaccgggccacaccggtgtcctggtctccagtgtcgcgacactgtcgatttcggtacgtgcaatgcggcggcggtttgacggatcgacatcccagactcccgcgcgtcccagatcgccatgtggagagtatttgcctccagtgcggccgccacacttgcacgctctcgcgcacgctcgaatgcccgcctagtgctctcaaatgtcgtcacgacgcctccccctgaaaatactcagggtgtcccacggtgggacaccctgagtatttcataccccaactcgcctcaccacacgtcgacctcgacaccgatcaagcgacccgtatcagcgacattgccgtaccgctgccccgcctggtcctccagccacgacaacgcatcccgaaacagcccgacgtcttccaaagctaaaccacagtcgtagccgcccttgtcccccaaccgcaccatctggcgctcccggtggcctccctcgtcgacctcgatccacagtttcgcgtgcatccgctggcctcggccctctgacaggatctcggtgagcaggtcggacgcctgccctcgcgcatcctcgttactgcgggggaattggagtatgtgggaggaacgatgatgggggaggttggtgacctcatggcgcagcaggttgcgcttgtgcatcttccgctcaaggcgctcgggctgacctgttgacggggttgagccgtggcgccgcttcctcggcggggtctcgatccgttgctcttccggcggttcggcgtcaggttgtggtgcgcgatctcccctaggacgggggggatcgccacctatatccgagggacgatgagacggccttccacgcttgctgcgcactttcgcagcccgccccttgcggtcacgtcgacgcggcggcggagtgacgtcctcaccgcgcgctaactgcgtcaacgccgccaccaggttggtgcccggtttcagccctttcagcacgaaccgcaccaggcgggggtctcggccgattcgtcgggcaatctcggcttggctccacccctcggccaacagggtgcgcaacaagtcttgggcccggttatcacgctcagtcactggtcgccccctcggggagtcctacttgctcggcctgctctgatagagcagcccgctccgatccggtctgaggcgcttccaaagggcccggcaagacacctttgacacgcagccgcccgtccttgccgtcatcgccgcccccctgggccacagggagcgcccaggggggcacgttgctggtgtagatggcgtcgccgtggatagccagcacggtgcgggagttcatgcgtagtgctcctcccttggttgtggcgttttttccggtggtggggtcggcgatgggtgtgttgagggtgcgcacgcgggacaaggcccagat

SEQ ID NO: 323 - DNA, 1856 bp, Propionibacterium acnes
ttggtattggtaggcgatggtgtcaccggttttgttgcggatgacgtcgaagccttcgatgtcggaggggatgtcgtcggcgtcgtagacgacggtggtggtgacggggttggaggccgacatttggccgatggtcacgcgcagcatgtttttcaacgcggaggtgaggattgtcgtggcggtggggtttttgtctgcccagcgtttctcggcgatgtcgatcatgtcttggatggttttgacccatcctcggatgggatcgactttggtcagtttgatcccttcgaggaactcgatgggctgggtgatgggcccatctggtccggcttcggtgtcccagccttcgtcgatggctagtttcagttcggcggtatcgacccatgtttcgtgggtggtgccgggcacgttgggccaaaaccatcctgctcgtcctttggtgcgtttgaccggtagtaggccgatgtcgtcccaccaggatggcacggtgaagcggatgtggtagcgggccgggtgccaggggttgttggtgaacaggtcgcgggcttcggtggcgctgagcagagtggcgggtgcggcaccgatctctccggtcactgatccggcatacatgaatcggccgtcgatgtacacgaagttagggatagggccggcaggcacggtggggcgccagcccttttcgcggtcctcggggttgccgtcgtcgacgcatagttcgtagcggtgctgaggggaggtgtgttggatgagtgcgcccagttcggggtccatcggctccatgcgataggactcgggggtccgtagcttccagaggttgattccttctgctccggggcggtccatgagggcccagtcgcggtcgattctggtggcgatgatgtgggttaattcgcgccatgcccagcgggcctggattggggtgagggtctggccagggaaccattcatcagcgaccagaatgtcgaggttgcggtcggtttctttgtgggtgaaccggcctcgggcgggccgcccggacagcatgaacaggccccgcacgtgccagtcctggttgaactcgcgggtgtgagcgggggtgtcaggcagcagccaggattgaggctggtcggggatgttaccgcagacgatcaggcgtcgggcgttgtggtgtagcgcggttgttagcaggtctgacagggtcgcgtgcttggtgcgtcgtccccccagcactggcaggatctcgtttccggccgcgtcgactccccgggcggtgtcgatgtctagccacactgtttcggggtcggggggccgatgtggggcgggacggcgctgctcctggtcgtctctcatggtttcctcctttgggccagggagcggccggcgtcgagggcgttcatgcgctcgcgttgttcttcgcgtagttggtagacccggcctcgtgacactcctgctgcctcggcgatggtggtggccggcaggtggccgatggcggcagcgtcggcaaggacgtcacgccaggccaggtcaatggttcccagctgggctagagcttcgtcgcggcggcgggtggcatcagccactacggaggcccaccctgtggggtggatggtcttgacgacgattcggttgtggcggatggggccccatgcatcagcggggacttgccagccgtgattggcggcggactcggtgatcttgaggcgtcgctcaggtgcgcgggtgcgggcagtgacgtcggtgttccaggtctggactggtacccacgtcccctctcggatgcgttcgatgacgcacgtggtgacctcgtcggtgactgtgatgaccagacgataatctttcccgtctggagtggttcgatagctgggcatgtcaccctcccc

SEQ ID NO: 324 - DNA, 1832 bp, Propionibacterium acnes
ttggtattggtaggcgatggtgtcaccggttttgttgcggatgacgtcgaagccttcgatgtcggaggggatgtcgtcggcgtcgtagacgacggtggtggtgacggggttggaggccgacatttggccgatggtcacgcgcagcatgtttttcaacgcggaggtgaggattgtcgtggcggtggggtttttgtctgcccagcgtttctcggcgatgtcgatcatgtcttggatggttttgacccatcctcggatgggatcgactttggtcagtttgatcccttcgaggaactcgatgggctgggtgatgggcccatctggtccggcttcggtgtcccagccttcgtcgatggctagtttcagttcggcggtatcgacccatgtttcgtgggtggtgccgggcacgttgggccaaaaccatcctgctcgtcctttggtgcgtttgaccggtagtaggccgatgtcgtcccaccaggatggcacggtgaagcggatgtggtagcgggccgggtgccaggggttgttggtgaacaggtcgcgggcttcggtggcgctgagcagagtggcgggtgcggcaccgatctctccggtcactgatccggcatacatgaatcggccgtcgatgtacacgaagttagggatagggccggcaggcacggtggggcgccagcccttttcgcggtcctcggggttgccgtcgtcgacgcatagttcgtagcggtgctgaggggaggtgtgttggatgagtgcgcccagttcggggtccatcggctccatgcgataggactcgggggtccgtagcttccagaggttgattccttctgctccggggcggtccatgagggcccagtcgcggtcgattctggtggcgatgatgtgggttaattcgcgccatgcccagcgggcctggattggggtgagggtctggccagggaaccattcatcagcgaccagaatgtcgaggttgcggtcggtttctttgtgggtgaaccggcctcgggcgggccgcccggacagcatgaacaggccccgcacgtgccagtcctggttgaactcgcgggtgtgagcgggggtgtcaggcagcagccaggattgaggctggtcggggatgttaccgcagacgatcaggcgtcgggcgttgtggtgtagcgcggttgttagcaggtctgacagggtcgcgtgcttggtgcgtcgtccccccagcactggcaggatctcgtttccggccgcgtcgactccccgggcggtgtcgatgtctagccacactgtttcggggtcggggggccgatgtggggcgggacggcgctgctcctggtcgtctctcatggtttcctcctttgggccagggagcggccggcgtcgagggcgttcatgcgctcgcgttgttcttcgcgtagttggtagacccggcctcgtgacactcctgctgcctcggcgatggtggtggccggcaggtggccgatggcggcagcgtcggcaaggacgtcacgccaggccaggtcaatggttcccagctgggctagagcttcgtcgcggcggcgggtggcatcagccactacggaggcccaccctgtggggtggatggtcttgacgacgattcggttgtggcggatggggccccatgcatcagcggggacttgccagccgtgattggcggcggactcggtgatcttgaggcgtcgctcaggtgcgcgggtgcgggcagtgacgtcggtgttccaggtctggactggtacccacgtcccctctcggatgcgttcgatgacgcacgtggtgacctcgtcggtgactgtgatgaccagacgataatctttcccgtctggggtggttcg

SEQ ID NO: 325 - DNA, 1890 bp, Propionibacterium acnes
ccacccctgccgggttcgacttcgacgctctggccgagtgggccgagagcgatgaggcgacccacaccccgcaaaccagccccgtgttccggggcaaggacgccgcgcgcgccagccgcgcattcctcggccgaggacggcccaccctcggcgcggaccacgccaccggcgagggccggtcgccccgccgtcaggtacggctcgacgcacgcaccaacgcgcgactcgacgcctacgcagccgcaaccggcaccagcgcctcccagatcatccgcgacgccctcgctgactacctgcccgcctgatcccaccccaatccactcgggcgcctgtcagtgccccctcttctgggtggtggtccggggcgtcaccgccccggaccagttgggtagtcatctcagttgaaataagcgattagtgatacgcccctcctgctttccggtgctgtcatgagcgtctgacaacagcgacacctcggggcagccgacggacagtcctctggctgccgctctgatcccatgcccacggcacgaaggtgtcggacagctcggtctcatcatgtgcccaaatagcgtcgtgggcctgtcgccaagcttctcgggagccccacacgggcacgaccgggccacaccggtgtcctggtctccagtgtcgcgacactgtcgatttcggtacgtgcaatgcggcggcggtttgacggatcgacatcccagactcccgcgcgtcccagatcgccatgtggagagtatttgcctccagtgcggccgccacacttgcacgctctcgcgcacgctcgaatgcccgcctagtgctctcaaatgtcgtcacgacgcctccccctgaaaatactcagggtgtcccacggtgggacaccctgagtatttcataccccaactcgcctcaccacacgtcgacctcgacaccgatcaagcgacccgtatcagcgacattgccgtaccgctgccccgcctggtcctccagccacgacaacgcatcccgaaacagcccgacgtcttccaaagctaaaccacagtcgtagccgcccttgtcccccaaccgcaccatctggcgctcccggtggcctccctcgtcgacctcgatccacagtttcgcgtgcatccgctggcctcggccctctgacaggatctcggtgagcaggtcggacgcctgccctcgcgcatcctcgttactgcgggggaattggagtatgtgggaggaacgatgatgggggaggttggtgacctcatggcgcagcaggttgcgcttgtgcatcttccgctcaaggcgctcgggctgacctgttgacggggttgagccgtggcgccgcttcctcggcggggtctcgatccgttgctcttccggcggttcggcgtcaggttgtggtgcgcgatctcccctaggacgggggggatcgccacctatatccgagggacgatgagacggccttccacgcttgctgcgcactttcgcagcccgccccttgcggtcacgtcgacgcggcggcggagtgacgtcctcaccgcgcgctaactgcgtcaacgccgccaccaggttggtgcccggtttcagccctttcagcacgaaccgcaccaggcgggggtctcggccgattcgtcgggcaatctcggcttggctccacccctcggccaacagggtgcgcaacaagtcttgggcccggttatcacgctcagtcactggtcgccccctcggggagtcctacttgctcggcctgctctgatagagcagcccgctccgatccggtctgaggcgcttccaaagggcccggcaagacacctttgacacgcagccgcccgtccttgccgtcatcgccgcccccctgggccacagggagcgcccaggggggcacgttgctggtgtagatggcgtcgc

SEQ ID NO: 326 - DNA, 1795 bp, Propionibacterium acnes
gacgccggccaccccaactactccgacccacacggtgaccccagctccggcctctgccggccactcgaccagcgacgagcacccaatccatacggataccgccacagcggacaaggccagcgacgaggacgccctgtccccaatccaggtgggcttgaccgccagcgtcggactggtgctggtcgccggactgatcaccaccctcaaccgccgctaccggacccggttcacccgccagccccgcggcaaggccatgaccctgcccagcccggacgcccaaactgccgagatagcgctgcgcagcaccggggcgactgacactctgacgatcacctgcctcgaccaggcgctccgcgcgatcggcgcatggtgccaccactgcgggcacccgctgccacccctgctggccgcccgcgtcgatgacgaccggatcgacctgctgctatcccaggcggcccccgaccatcccgaggcggtggagctggccgccgacggatcggtgtggaccctcaccgccgaccggatcgacgacctgctagcccacaccgatgacaaccaagcggctccgtggccgtctctggtcacactgggacgcgacgacgacgacgcccacatcctcatcgacttggaagccgcaggaaccttgcacctgatcgccgatgacgaccaggtcgacgcggccctcgccgcgatcgccgtggaactggccacctgtgactggtccgacgaggtcaacgtcaccctggtcggccaggtgtgcccgggcctagaagacgcactagagtctccgaccctgacccgcgccaccgacgtggacgccctcctcacccccctggaagctcgcgccgacgaccagcgacacatcctcaccgaaggaagccccctcgccgctcaccgagccgaccccgccatctccgacgggttcgacgccgaagtgatcctcctcgacaccgaactcaccgaagaccaccgcaaccgcctcgccagcctcgtcgaggctcttccccgcgtgtcagtcgccgcggtaacaaccagccccaccagcccagacgaatggtccctcaccctgacaggtgacccactagccgccgacgtggctcccctcggctggcacatccacccccaaaccctctcccccgacctgtacaaccgcatggttgaactactcgccaactccgccgccgcagactacgaacccgccagctggtggaaccacgacgccgacgacgagcccaccaccgaccccaccaacgaggaagaatctaccccgagcaggcgagcccgcccgaatatccgcctgaccaccctgaccggcggcatcgacctatccagcgtcgacatcgacgacatcatcgacgaagccaaccaggccctcgacaacaccgaccaggccaccaaccaggttcgtgtcgacaccgaccaacccggcaccgacacccccttccccatcgacgacatcgacccgctgagctccgaccatccggtcctatccatcatcggccaccccgacatcacaggtgccactggaaccgttgggcgctccccgtggcgctgccaacagttggccctctacatcgctgagcatccgggggtatcgggggcgactatcgccgatgatttggggctatcagcgtcgacggtgcgctcgattgctacacacctgcgacactggttgggagccgacgatgccggggtggcttacatgccggcggcgacgcgcggctaccggctcgatgagcggatcgtcacagatgtggacctgatcgacgctgctgtggccggggcaggcattaac

SEQ ID NO: 327 - DNA, 850 bp, Propionibacterium acnes
gacagtgatacgtcgtatcggtgccctggtggcactgctggtggtgatagccggcttacccgccgggctcgtggccgcaggcgccccgctagtaccctcgggcctgtcatgggcccatgtgcggcatctgttggttaccccagacatgaccgggtcggtgctggtgtggctggtcagcctcatcggctggatcgggtgggcatggttcgccctggccgtcgcagccgaagcggtgacgatgctctcagggcagcggctgcactggcacatgcccggccctcgcctagtgcgccgagtggcagccggtctcctcattgccgcgttcgcggccgcaccggcagccacaagcacggctcacgccgccgaggccacccatgtggcggtcgccgcccaggctggaccggcacacgcggccggcacccaggacagccccgccaccacctctcaggccccggacgcctccaccactccgaaaatctggaagacctacacggtgcgggccaacgactacctgtggaagatcgccgagcactactacggtgacggcgcccaattccgtcgtatcgccgaagcctccggtatcgacccgcactcagagctgaaagccggccagaaactgatcctgccggttcctaagaacacggccgcagtccactcggttaaagcgggggagtatctgtggaagatcgccgagcactactacggtgacggcgcccagtaccataaaatcgctgaagcttccggtatcgatgcccattccgatctagccgtgggccaaaaactcgtcatccccgggcccctccgccacgacgccacgccgccacaccactcggcgtcgacccacgcgaag

SEQ ID NO: 328 - DNA, 1845 bp, Propionibacterium acnes
attcttgtttggcggtcatgatagcgatgaccgctgcctgggtaggcagtttgtcacgctggaccacagtgacgatggtggtcacgagctgcttctgtctggcggtgaggcctccggcgccgaccccgccgccggtgacagttcccatgcaggcatccccgccagcgcctccaccagagttatcgtcgagggccccagagcctactgacagcagcggcacaatgatcacggtcgctggcaagaccgccaggcccgccagcatcagcactgctgcactcaccacggcgatcacgtgagatgctttcaacgctgcccacctctcgctggtttgagggggcgacgcctgctggtacgcacaggcttggttgatccagtccgccgttgattggcaggcctgggtttgatcggcttgctgggacccggtttgggctccggagtcttaggctccggcttcacatgcctaggcacttcggctgcggtgggaggagtcagcacgtggcgtaccggcttggtgaccttctgggcacccgaaacaaccggcttagacaccaccttggcacctttgaccaccggtgcggctgccttcgcgccggccttcttgactgcacgatgcgctttgatagccccggcctcggcccggccaaccctactagcagtagcatcgagggctctgtggcccgtcgttgccctcaccggtgcatccttgccctggcgggtctgcttagcgatcgccgacataccgccccgcaatgccgaaacatgattgtgggcgtgggcgatcgccgacatgccggccgtcgcgatttttgactggccctgcggggcccctgccccagcacgaatctgccggtaagccgccgacgtgccacgagcacccgccgccattcgcgccaccttcgcagccctagtcactcccgtcgacacgccacccgtggctaccgcagcagcacccgagaccacagtcgaggccatccgccttcgacccaatccggtgagcttgcgaccaccgctgcgcaccatccggcgagcaccccgcccagcccactggccgatcaccgagcccctttcggaacgcttgctgcgcatccaatcgttgatcttgtccctcagccccttctcgcccttgtgacgacgccacatggacatcaagaacccgataatccccacgagctcgagcatgttgacaaccatgaccttgatggcgacatcaccgtcagaggcgaaaaccgacttgatgatgagcatgaccacacccaacatcaccatcgacccgacaatgccgatcatcgagtacaagatcgaacacagatcccggatgagcggatctgtgcggccagggatagcccgcaacacgttgagcatcgacatgaacgccgaccacaccaacttgcacacgtagaaccagcacatgcccgcgaacaccagcaggaccacagccaaacccgccaccgttgacgagtaaaagaagaaccccaccaaccacgaaccatccgcaatatcgccggcgtaatccgacaacccctcatcacagtcaccaaggtcgtcgcgagcatccgagacgtcatcgtaagggccacccttgagcacctcgatgtacttgtcgtggcacttcgcatcaataatgcggccatagttgagctgctgatgaaccggcgccacgaacgagtccacaatgatcgccgacagcttcggatccttcgagtctcccgtcgaggtcatgtcatcaggaatctcgacctcaccagcggtcgccgtcgcaggatcaaccgaactggtaatcatatgagacagcgccacaccgaactgctgggtgcgagccagcggagtagccaacgtcgtcgtatc

SEQ ID NO: 329 - DNA, 1875 bp, Propionibacterium acnes
ttgatgagcaccccagcggccagctctgtggcagcaaccgggtgggctgggctgtagaggaggtcgatgtcgcgggcagggtcgtcgggttcttcggttacctcgggtggggtcgatctggctgtctcggtgtcgtcggccaggtcggctcccaggatgcgttcccattcggggctggttttcttgcccgctgaggccatcgtctcgtcgatctgttcgtcagtgggccacacaaatttctttttggtccaggtcgtggtgtcgggtcgcagctgatccagcagttccaggtcttgcggggagtgggccttgcgggggtcgggggtgtagaagaattggacttccttgggggctgattcgccggataggtaggtgccgcggccgcgtttgccgaacgggattcccacgccgacgtgttcggagccgaacatcatgcgggctccgtcagcggacaggggtccggtggcggcacgcccggagaagttgtctcggatttcgccgcccaggaactcggcgtcggggcgttgggtccccagatcgacgtggatacggcaggcggctgccatgcgcagcagggagccgatccagccgaaaacggggcattctccgggcatcccagagaccttgatcgttgaccaccagtttttcgcgttgccgtagaactggcggtactcgtcgatgaggaccagcacgcgggtgaagtcggtctcgcgggccccttcttcttcgatgcggcggtagcggtcctccatgagagaccacagccagtggatgagggcgacctggtcggggacggtagtggcgaccatctcgatgttgggccactcccgcaggcccaggtactcgatgcgtttagggtcgatgacgaagacgcgccagttgcggcgggcaccctcgacggcgtcgccgatcatggacaccgtttttccggtacgggtgcggccggccttgagctggtgggccatgacaccggagatgtcccagaaacaggtgttgccgtcctcgtcgacggcctgggggattttctcccagtctggggagtctgggcccggaagggccacgggtcggggcaccatcgagggcagggggtggcggcgggtgacggtgatggtgtcgtgttccaggtcgaagtcgctgcgccactggccgagcatcatcgccgaggtcaccgcggccaggcgcaattggatgttcgggctggacaaatgggcgccacgttggtggtgaatggtgaagccgtccaggttcccccgatcggttttccaggaatcgacggtgaccgccgacccatagatctgagtggctacttctttagcccgttccttgtctcggtccagatcggttttgtcagggtcaggggtcggggcgcggtattgcaggacgaaccggccggccgggatcgttgcggatgtcaccgtgaactctgccggcgaccaggcagccgcggccgcctgggtgagggccattggcatggtctcgacggcagcctcctcgggggggatggtgagggtcaggcgtcgcggatgcgtcttcttgcgattccatgtgactttctgcctcaccggcaccttcgccgccgactgaatggctaggcgagctgattcggcagtttcggtacgccggccagcgcgtagcgcccgtcgtgcgtgaaggctgcccaccacagcacagcccatacacggcagccaccagcgcggatcagcggctgctgcatagcccccggtagctagtaccgcacctgaccagccggccgcgatacttttccacgccggtttcgcaccaacagtcggggcagacgctggccgcttcgagaccgaggagggacgagacaagggagtgctggtcatgccgcggcctccttgtggcaggtcattt

SEQ ID NO: 330 - DNA, 1794 bp, Propionibacterium acnes
agaagacgcactagagtctccgaccctgacccgcgccaccgacgtggacaccctcctcaccaccctagaagctcgcgccgacgaccagcgacacatcctcaccgaaggaaaccccctcgccgctcaccgagccgaccccgccatctccgacgggttcgacgccgaagtgatcctcctcgacaccgaactcaccgaagaccaccgcaaccgcctcgccagcctcgtcgaggctcttccccgcgtgtcagtcgccgcggtaacaaccagccccaccagctcagacgaatggtccctcaccctgacaggtgacccactagccgccgacctggctcccctcggctggcacatccacccccaaaccctctcccccgacctgtacaaccgcatggttgaactactcgccaactccgccgccgcagactacgaacccgccagctggtggaaccacgacgccgacgacgagcccaccaccgaccccaccaacgaggaagaatctaccccgagcaggcgagcccgcccgaatatccgcctgaccaccctgaccggcggcatcgacctatccagcgtcgacatcgacgacatcatcgacgaagccaaccaggccctcgacaacaccgaccagaccaccaaccaggttcgcgtcgacaccaaccaacccggcaccgacacccccttccccatcgacgacatcgacccgctgagctccgaccatccggtcctatccatcatcggccaccccgacatcacaggtgccactggaaccgttgggcgctccccgtggcgctgccaacagttggctctctacatcgctgagcatccgggagcatcgggggcgactatcgccgatgatttggggctatcagcgtcgacggtgcgctcgattgctacacacctgcgacactggttgggagccgacgatgccggggtggcttacatgccggcggcgacgcgcggctaccggctcgatgagcggatcgtcacagatgtggacctgatcgacgctgctgtggccggggcaggcattaacaccgctgagacggccacactggtggccattttgaagctgggccgcggacgggtcttcgctggggttcctgactcggaacttcgccagttcagggcgtcgatgtaccacgtggaggcccgcatcgtcgatgctgccctccaagtgacagaccgggccctggaagccggggacctggggctggcccggtgggcgttgacccaagggctactggtgtctcccgatcatgaggacctggtcaccggttgtctgcgcaccgagtaccaggccggcaacatggacaaggtttccgagctggtcgatcacctgtcggctaccgcacgacgcctgggcgtcgatttgagcgccgacaccacccggatcatcgactccgttattacccatacacgcaggagagcatcatgatctcccgttgcactcatctccgtcaggaaggttcctatgcaccattatcgtcttggtatcggcactgccctcatcgcggtagcagccgtggccggctgtcgctcaacagactcgacacccacaccacctccatcccgtgtctccgccacgacatcagcgagctctaccctcagcccgaccccgtcagccggagcggtcagtgccgccgacgccgaaaaggtctaccgcaccttgcacaccaacgtgttcgcattggagaagaagggtggcctggtacccggggaacccgcacccgcatccctctcggactacgccagcggccaagcactcaagaactacatgaccttcaaccaccaaatctcggg

SEQ ID NO: 331 - DNA, 1064 bp, Propionibacterium acnes
caccaacacatccaaaaccatcctcacgctcacccgcacagccaccatctcccacctgctagccatcctcgatggcctaccccaagctgaggggactcactggctcaacactcaacccgacctccaccacatcaccctcgacgactccaccaccggctgggccaccaaccgcaccgacgacaccgacaccggcgtctgctacgacaccagcacccacaactggcagatctgctgacagcatgacgggcctgcccttgaggggttggactctgcacccatttcagccgggtacgttgccggctgggcgaaggaagcagacggcgccgcgattgaagctgccgccgagcacgtcgcgaagacctcccacgcgattgccgaggcgttgcagctcaccgcacagtgagccccacggggcgaccggctcaccccggtcgcccctcaccccccgacaggggaaccgttcccgccgcctgaatctccatacccctgatacgtactacgcggggtcgaggagtggactcccccgccctgagcagtacactgtactacacagtcattgaggatagaggtgacgtcatgagtttttcgatccgtttacccgaccatgagcgccgcttagcggactcctacgcccgcctacactcacaatccctgagcgaggctttcaagcaagccctcttcgaccgcatcgccgacgagttcgaccttcagatagcacacgaagctctcaccgactacgccaacgacaactaccagtctcgtcccatcagcgagctatgggacgagtgtgacctatgagctggcagatcgaaaccactagccggttcgataaagaattcaaaaagctggaccgctacacccaaaaactcattcacggctggatcacgaaaaacatcgacaacaccgacgatccccgccgccacggcaagcccctcaccggtgatctttctggactgtggcgctaccggatcggtgattatcgcctcatatgcacactcaacgatgaccgcctcatcatccttgccctgtccatcggtcaccgccgcgacatctaccgctaagcc

SEQ ID NO: 332 - DNA, 1639 bp, Propionibacterium acnes
gagccagttatcctcatctacgacgatggctatgaactcctgatccacgccatgaaagcccgccctcagtatctgagctacttcgctatctagtgttgttgggcgagttgaactcaacttttctccgacgcaagcgccaataaaaggctgatccatccgaataccaccaaacacggctgaagtgtggaacagattcagcaagacagggtgcggtgctcgggtgcgttggggagatgaggatattcaggcttctggcgggatgtggcttgatgacgtccaggatcaccggttcggttttgaaggtgccttgcattaatgtcgacagggtcgtacgactcgaggactggatcgaccagcccgttgcgtctgaagaacttcatccaccccggtggagctccggccgcgtactggtgcaacggatcattagcatgggtagcgtgagtatgccttcgatcgtggtcagtgctgtcatcatccaagattctgacgggcggcttctcactgtccgtaaacgaggcgccgaggcattcatgctgccaggcggcaagccggagcccggcgaggactcgcgtcaggcagtagtccgggaagtgcacgaagagctcggcgtcgcattgtcttccgacgacctgcgtcgggtgggagtgttcaccacgcgagcagcgaatgaggccggccatcaggtggtggcgacgattttcacccacaccccggttgcggtgagtgagccagctgctgagatcgagcagattcgttggctcgattggagtgtcgacgccctgcctgatgacctggccccgctgctggtcgaggcagtcatcccgtggctgcggcgccgtatccggtcggtcgctgtattcacgggtgcgaaggatggaaccgaccctcattatcgtgtcgaagcaaccgccttgggccggggtctcgcacacgccgggatcaccctggtttatggcggcgggaaggtcgggatgatgggtgctgttgctgatgcggccctcgctgctggcggcgctgtgatcggagtgatgccgcagcacttggtggacggggagatcgcccatcctagtctgactcacctcgaggtagtgcggactatgcatgagcgcaagcagcggatgagtgacctagctgacgcgttcgtcgcgctacccggcggcggcggaacccttgacgagctattcgaagcatggacatggcagcagctcggtgtacacagcaaacccgtggccttgtacgactcgaccttctgggcaccgctgaccgcgctactcaaccacatgaccatcgaaggcttcatccgccctgaggaccgcgcctcgctcgtgatcgccgataccatacatcagctgatggccgatcttgagggatggaccccaccaccaccgaagtggcgctcgtgacatagaacaaatgattctgactatggctcattgacatctgcgcagcggctactagctccatcgacttcaaatcgggccttggccgaggctcggttcaggtggcccggaatggatccccacaaattgaatgctcatgatcgaggtgatgaacgcccactctattgtcctacgcccggttgtatccagcgagcaattgaaggtgctgcgcctgttggtcgaccaggccgagccactca

SEQ ID NO: 333 - DNA, 1200 bp, Propionibacterium acnes
ccggagtatctggacaaggccgtgctcactgcgttgtatcccgatgggttgcccttcgacgaggacaccgaggagccgggcgagaatgccgggcaggaggagcttgcgatgactggatgagcccgaacatggttgaaggccgccccgccaggcgaccttcaatcaatggtttcggttgtcagctgcagccacccttgccaggtgctgtggttcttctccagaggaggagggaccgccatgaagacccagaagatctagaagatccaaaagaaccggtttcggctgttgcttcggtcttcatggtagctgatagcccgcgtcgttggaagtgcgacgacgccgatcctcatcggtatcgcaccctgttccagggtcgagaatgtgaaggattaacaaccatgacaagtcatgagacgccctccctgagggcgtcatgaccgctttaattcaagctctgccgacagctgaactgtctgctggacctggtgctagcagtccagctagaccctctgctgagggcttcatcaagattcatcacgaccttattagtgcgggcgtgtcgggtaacgcgatggcgttgttcgtcgcgttacgtaaccagcccggctgtgatcagtggacccgtcactcgtacctgcggctagcccaatggtgcggctgggatgggctgtcggaggcggcgggctgtaagcgggtgcagcgggccgctgctgagctcgctagcggtggttggctggaatcgcgggtcggccatgatcgtcgcaccgctaagacgctggtgtggcatcggttgaccagccccgacaccgaccgctgggagcaattgccgcggattgtgtgggcgaggatctgccagatcgccggggagacgtcgggagagtgggtgaggcattggctggtgtggcggatgctggccggtcgtactggtgtggctcaggcccctatgtccatcgtggctcggttcctgggctgttcttcgcgccaggtctctcatatccgtggggctctcgttgatgccggtctgctcggctgtgacgaggtctcgggggcggcgagccgggtgtggttcccctcgatggccgaggagtgtgcagcggatcgtgaggtggtcgatggggccgtcgtcgatgctggggtgggctctggtgaaggtgtcgaggagggcggggaacccctgtcgattttgtccacccacccctg

SEQ ID NO: 334 - DNA, 1639 bp, Propionibacterium acnes; identical to SEQ ID NO: 332

SEQ ID NO: 335 - DNA, 1202 bp, Propionibacterium acnes
ccggagtatctggacaaggccgtgctcactgcgttgtatcccgatgggttgcccttcgacgaggacaccgaggagccgggcgagaatgccgggcaggaggagcttgcgatgactggatgagcccgaacatggttgaaggccgccccgccaggcgaccttcaatcaatggtttcggttgtcagctgcagccacccttgccaggtgctgtggttcttctccagaggaggagggaccgccatgaagacccagaagatctagaagatccaaaagaaccggtttcggctgttgcttcggtcttcatggtagctgatagcccgcgtcgttggaagtgcgacgacgccgatcctcatcggtatcgcaccctgttccagggtcgagaatgtgaaggattaacaaccatgacaagtcatgagacgccctccctgagggcgtcatgaccgctttaattcaagctctgccgacagctgaactgtctgctggacctggtgctagcagtccagctagaccctctgctgagggcttcatcaagattcatcacgaccttattagtgcgggcgtgtcgggtaacgcgatggcgttgttcgtcgcgttacgtaaccagcccggctgtgatcagtggacccgtcactcgtacctgcggctagcccaatggtgcggctgggatgggctgtcggaggcggcgggctgtaagcgggtgcagcgggccgctgctgagctcgctagcggtggttggctggaatcgcgggtcggccatgatcgtcgcaccgctaagacgctggtgtggcatcggttgaccagccccgacaccgaccgctgggagcaattgccgcggattgtgtgggcgaggatctgccagatcgccggggagacgtcgggagagtgggtgaggcattggctggtgtggcggatgctggccggtcgtactggtgtggctcaggcccctatgtccatcgtggctcggttcctgggctgttcttcgcgccaggtctctcatatccgtggggctctcgttgatgccggtctgctcggctgtgacgaggtctcgggggcggcgagccgggtgtggttcccctcgatggccgaggagtgtgcagcggatcgtgaggtggtcgatggggccgtcgtcgatgctggggtgggctctggtgaaggtgtcgaggagggcggggaacccctgtcgattttgtccacccacccctgtc

SEQ ID NO: 336 - DNA, 1641 bp, Propionibacterium acnes
tattcgtccagatccgtcaagtcctcaaccgtgcctccctggaaaacgtcgacccgtggaacgggctagaccggctagccgaggacatcaaactgcccgaactcaccgatgtggtctccatcgcccgcctccaaaacgaaggcgcctccctcgtcgacagtttccgggcccgagtcgccgagttacgcgacgcctacctgctgcgcctgcaacaagaatccaccgccatcacccagcggcttggtttgtggacgatcctgcaagccggctcggtcatgctcatcttgctgggggcggccgccctcacactcatcacagccggataaaccgacaccgtgtcgagcccccatatgggccgcgaacctttcataatgatgcctgtaagcaccacaatattgatcacaacctaacaatgaaggagaaatcatgatgaccgatctcgacctggctaaaaaacagatcacctggctggcggcgcacctgagttcccggatcgttgacgagcgtggcggtggtagctctaccgtggagacactgatttggattggtgtcatcgtggcgctggtgattggtgtgggcgtcggggtgacggcctatatcaggtcgaagatgcctcactgacgacgatgcgtagcaggttcacaactgatcagcgtggcggtggtagcgcgtcggtggggatgctcctgctgatgcctgcgatcatgctgctggcattcggtgggatcgaggtcgggatgtggtgtcacgcccatcagtcgaccatcgcggcagcccaaagcgccgcggaagctcagcgtgtcgtccatccggtcccggggtcggcacaggaggcagcctcgcagatcactagtcatggcggggtgcgtgatacccggatatcggtcagtgatgacggggccactgtcacggtgaccgtctcaggtcgggccccatcgatgctggggctgcatcttccggctgtgtcgtcgacagcgtcgatgcccaaggagcgcctgtcgtgaggcgaagtgagcgcggcggagcaagtctaagcgtcgaggtgctcatgtgggcgccgatcgcgctggtgatcatcgggtttgttgtgggtatcggccggatgtcgatggcccaggacgcggtgagtggcgcggctggtgctgcggcccgtgcggcgtcgttggagcgtgatggacagtcggctcagtctgcggcgcagcaggcggcgtcggcgaacctgtcgtccggtgggctggcatgtgcgccgagtgtgagcgtggacacgtcagtgtttgcccgtcctgccgggcaggcgggcacggttcacgccacggtcacgtgtgtcacctcgctgggtcttggattcgggtcccggacggtgcacgcaacggggtctgccccggtagacacctatcgggaaaggagaggctgagatggcccgcgatgagcgtggtggcggctcggtgtcggtgtggatgctgctcatggtgccagtaattctggtcatggccggcctggtttttgacgggtcccgtcagatatcggcaacccaggcggcccaggacgcggcggttgcggcatcccgcgccggaactgatgcggcagcgacaccgcagctagctggccacgacggggcggccgtagcagtccaagcggccc

SEQ ID NO: 337 - DNA, 1630 bp, Propionibacterium acnes
tctgcccagcgtttctcggcgatgtcgatcatgtcttggatggttttgacccatcctcggatgggatcgactttggtcagtttgatcccttcgaggaactcgatgggctgggtgatgggcccatctggtccggcttcggtgtcccagccttcgtcgatggctagtttcagttcggcggtatcgacccatgtttcgtgggtggtgccgggcacgttgggccaaaaccatcctgctcgtcctttggtgcgtttgaccggtagtaggccgatgtcgtcccaccaggatggcacggtgaagcggatgtggtagcgggccgggtgccaggggttgttggtgaacaggtcgcgggcttcggtggcgctgagcagagtggcgggtgcggcaccgatctctccggtcactgatccggcatacatgaatcggccgtcgatgtacacgaagttagggatagggccggcaggcacggtggggcgccagcccttttcgcggtcctcggggttgccgtcgtcgacgcatagttcgtagcggtgctgaggggaggtgtgttggatgagtgcgcccagttcggggtccatcggctccatgcgataggactcgggggtccgtagcttccagaggttgattccttctgctccggggcggtccatgagggcccagtcgcggtcgattctggtggcgatgatgtgggttaattcgcgccatgcccagcgggcctggattggggtgagggtctggccagggaaccattcatcagcgaccagaatgtcgaggttgcggtcggtttctttgtgggtgaaccggcctcgggcgggccgcccggacagcatgaacaggccccgcacgtgccagtcctggttgaactcgcgggtgtgagcgggggtgtcaggcagcagccaggattgaggctggtcggggatgttaccgcagacgatcaggcgtcgggcgttgtggtgtagcgcggttgttagcaggtctgacagggtcgcgtgcttggtgcgtcgtccccccagcactggcaggatctcgtttccggccgcgtcgactccccgggcggtgtcgatgtctagccacactgtttcggggtcggggggccgatgtggggcgggacggcgctgctcctggtcgtctctcatggtttcctcctttgggccagggagcggccggcgtcgagggcgttcatgcgctcgcgttgttcttcgcgtagttggtagacccggcctcgtgacactcctgctgcctcggcgatggtggtggccggcaggtggccgatggcggcagcgtcggcaaggacgtcacgccaggccaggtcaatggttcccagctgggctagagcttcgtcgcggcggcgggtggcatcagccactacggaggcccaccctgtggggtggatggtcttgacgacgattcggttgtggcggatggggccccatgcatcagcggggacttgccagccgtgattggcggcggactcggtgatcttgaggcgtcgctcaggtgcgcgggtgcgggcagtgacgtcggtgttccaggtctggactggtacccacgtcccctctcggatgcgttcgatgacgcacgtggtgacctcgtcggtgactgtgatgaccagacgataatctttcccgtctgg

SEQ ID NO: 338 - DNA, 1643 bp, Propionibacterium acnes
gcgagccacgaccatcgccaagctgaatggagagcgagcatgagcaccacccctgccgggttcgacttcgacgctctggccgagtgggccgagagcgatgaggcgacccacaccccgcaaaccagccccgtgttccggggcaaggacgccgcgcgcgccagccgcgcattcctcggccgaggacggcccaccctcggcgcggaccacgccaccggcgagggccggtcgccccgccgtcaagtacggctcgacgcacgcaccaacgcgcgactcgacgcctacgcagccgcaaccggcaccagcgcctcccagatcatccgcgacgccctcgctgactacctgcccgcctgatcccaccccaatccactcgggcgcctgtcagtgccccctcttctgggtggtggtccggggcgtcaccgccccggaccagttgggtagtcatctcagttgaaataagcgattagtgatacgcccctcctgctttccggtgctgtcatgagcgtctgacaacagcgacacctcggggcagccgacggacagtcctctggctgccgctctgatcccatgcccacggcacgaaggtgtcggacagctcggtctcatcatgtgcccaaatagcgtcgtgggcctgtcgccaagcttctcgggagccccacacgggcacgaccgggccacaccggtgtcctggtctccagtgtcgcgacactgtcgatttcggtacgtgcaatgcggcggcggtttgacggatcgacatcccagactcccgcgcgtcccagatcgccatgtggagagtatttgcctccagtgcggccgccacacttgcacgctctcgcgcacgctcgaatgcccgcctagtgctctcaaatgtcgtcacgacgcctccccctgaaaatactcagggtgtcccacggtgggacaccctgagtatttcataccccaactcgcctcaccacacgtcgacctcgacaccgatcaagcgacccgtatcagcgacattgccgtaccgctgacccgcctggtcctccagccacgacaacgcatcccgaaacagcccgacgtcttccaaagctaaaccacagtcgtagccgcccttgtcccccaaccgcaccatctggcgctcccggtggcctccctcgtcgacctcgatccacagtttcgcgtgcatccgctggcctcggccctctgacaggatctcggtgagcaggtcggacgcctgccctcgcgcatcctcgttactgcgggggaattggagtatgtgggaggaacgatgatgggggaggttggtgacctcatggcgcagcaggttgcgcttgtgcatctgctggtcgagacggtcgggctgacctgttgacggggttgagccgtggcgccgcttcctcggcggggtctcgatccgttgctcttccggcggttcggcgtcaggttgtggtgcgcgatctcccctaggacgggggggcttgccacctatatccgagggacgatgagacggccttccacgcttgctgcgcactttcgcagcccgccccttgcggtcacgccgacgcggcggcggagtgacgtcctcaccgcgcgctaactgcgtcaacgcctcgaccaggttggtgcccggtttcagcccttttagcacgaaccgcaccaggcgg

SEQ ID NO: 339 - DNA, 1583 bp, Propionibacterium acnes
gaacggggcatgggattagccgaggcgctgcgcgaggggacggcccttcccccaccacagcatctcagcgaaaacctccacctggtcagtggcggcccggccctccacgagttcaccgaccccgcatccttagcggccatcatcgaccgagtcaccaccgcacgctacgacctgctagctcaggcccttgccccgctggcctgggactatgacctcatcttcatcgactccgggcctgcccaaactctgctgtcccagaccatccttggagtagcccgctggctggtagtgcccacccgcaccgataacgcctcaatcactggcctcgtcgacgttcaagacgccatcgacggggttgcctcctgcaaccctgaccttcaactactcggcgttgtcctagccggcgtgggggcccgggccacccggatcgccgcagataaacgccacgccatcgacacagtgctgggggcaggaaccgttttcgatgcggtcatccactactccgagaaggtgtccgtgctcgcacgccagcagggcaagaccgtcgccgagctagccaacgagtaccacaacacccagcccgcctacacctacctagctaaaggccagaacatccccaacgtcgccaaggcagccgtcagcatcgaaactgattatctgaggctggccaccgagatcagcgaccgcatgttcaccagcgacgagcaggagcctgatcatgactgacgatccgactccatccgagcagaacaaccccaccagcgacgacatgcgcttggccgaagaatgggccaacagcggccgcacagtgggagccctgccgcgccgtcaacggcctcagcaacccacaccccgcaccaccagccaaccccctgtctcgtcccctgacacaccggctccgaaaaaaccccagaagacccccaccagccagcctggccgtcaacggatcaacgtcaccgtctacgttgtgcccgaactccatgagcggctgcgctcccgatcggcggcgacgggggtgacggtctcggatctggtggtgcatgcgttagcgttcgtcgccgatcatgcgggggaggcgatcgccgatgatctgcgcgtcgagacgggccccggcatgggggccggactgttcgatgtgaccccatcgcggccagtaggggtcgccaaaacccagctgggggtgcgaatgacccgccacaacaagaatggcttggaccagctgacccggacgagtggagcccgtgaccgcagccatcttgtgtctgtcgccgtgcgcgactatctcgactccaaccctgtaaagaaaggccgacatgtccgctgatgaaactcctgccgcccggggtgggcgacgctttgatacgaccgtcaagcccaggcgccgtcccatgcttatcgccgccggtatcgccatcgtgatagtcggcgcgctcctcatcactcagttgattcgctccgcccaaaccgagcatcgcgtgctggaagtccacgccgatgtggctcgcggcgaggtcatccgtgacaccgatctggtatcggtgactgtcggccaggtcgacaacgtatcaacggttcccgcagac

SEQ ID NO: 340 - DNA, 1551 bp, Propionibacterium acnes
gctgagaaaaattttgggtccgccctgcatatcggggcctcttcataccttcaaaagtgtgaagggaatacagactcttcgactggaattaaaatggtatatggcgtgtccggtccgcacccagctccacgatgcgccatagaggagccataacttcaccaatcgtatacgatatgagtgtaggtgagcatctaccggtggccgacagtcagatacaagcatgggcggatgaagcagaagctgattatgacctcagcatgcttccgccgtctcgacgtggtcgcccaccggtggggaggggcccgggcactgtggtccctgtgcgcttcgacgcggacactctcaaggcgttgtcacaacgagcccctgacgaaggattgaccacgcgttctgacgcgatccgtgctgcggttaaccagtggctcggcctcggctcgtaaacattatcggcgcgacaaccttactgatgacgctgttggttacgccgtagagcacatcttgtactcgtgggcgctcgacgatgccgatgatcctcgttgctggatgatgattcggtgttgacccagctggcctcctcatggagctagttatcctcatctacgacgatggctatgaactcctgatccacgccatgaaagcccgccctcagtatctgagctacttcgctatctagtgttgttgggcgagttgaactcaacttttctccgacgcaagcgccaataaaaggctgatccatccgaataccaccaaacacggctgaagtgtggaacagattcagcaagacagggtgcggtgctcgggtgcgttggggagatgaggatattcaggcttctggcgggatgtggcttgatgacgtccaggatcaccggttcggttttgaaggtgccttgcattaatgtcgacagggtcgtacgactcgaggactggatcgaccagcccgttgcgtctgaagaacttcatccaccccggtggagctccggccgcgtactggtgcaacggatcattagcatgggtagcgtgagtatgccttcgatcgtggtcagtgctgtcatcatccaagattctgacgggcggcttctcactgtccgtaaacgaggcgccgaggcattcatgctgccaggcggcaagccggagcccggcgaggactcgcgtcaggcagtagtccgggaagtgcacgaagagctcggcgtctcattgtcttccgacgacctgcgtcgggtgggagtgttcaccacgcgagcagcgaatgaggccggccatcaggtggtggcgacgattttcacccacaccccggttgcggtgagtgagccagctgctgagatcgagcagattcgttggctcgattggagtgtcgacgccctgcctgatgacctggccccgctgctggtcgaggcagtcatcccgtggctgcggcgccgtatccggtcggtcgctgtattcacgggtgcgaaggatggaaccgaccctcattatcgtgtcgaagcaaccgccttgggccggggtctcgcacacgccgggatcaccctggtttatggcggcgggaaggtcggg

SEQ ID NO: 341 - DNA, 1546 bp, Propionibacterium acnes
gctgagaaaaattttgggtccgccctgcatatcggggcctcttcataccttcaaaagtgtgaagggaatacagactcttcgactggaattaaaatggtatatggcgtgtccggtccgcacccagctccacgatgcgccatagaggagccataacttcaccaatcgtatacgatatgagtgtaggtgagcatctaccggtggccgacagtcagatacaagcatgggcggatgaagcagaagctgattatgacctcagcatgcttccgccgtctcgacgtggtcgcccaccggtggggaggggcccgggcactgtggtccctgtgcgcttcgacgcggacactctcaaggcgttgtcacaacgagcccctgacgaaggattgaccacgcgttctgacgcgatccgtgctgcggttaaccagtggctcggcctcggctcgtaaacattatcggcgcgacaaccttactgatgacgctgttggttacgccgtagagcacatcttgtactcgtgggcgctcgacgatgccgatgatcctcgttgctggatgatgattcggtgttgacccagctggcctcctcatggagctagttatcctcatctacgacgatggctatgaactcctgatccacgccatgaaagcccgccctcagtatctgagctacttcgctatctagtgttgttgggcgagttgaactcaacttttctccgacgcaagcgccaataaaaggctgatccatccgaataccaccaaacacggctgaagtgtggaacagattcagcaagacagggtgcggtgctcgggtgcgttggggagatgaggatattcaggcttctggcgggatgtggcttgatgacgtccaggatcaccggttcggttttgaaggtgccttgcattaatgtcgacagggtcgtacgactcgaggactggatcgaccagcccgttgcgtctgaagaacttcatccaccccggtggagctccggccgcgtactggtgcaacggatcattagcatgggtagcgtgagtatgccttcgatcgtggtcagtgctgtcatcatccaagattctgacgggcggcttctcactgtccgtaaacgaggcgccgaggcattcatgctgccaggcggcaagccggagcccggcgaggactcgcgtcaggcagtagtccgggaagtgcacgaagagctcggcgtcgcattgtcttccgacgacctgcgtcgggtgggagtgttcaccacgcgagcagcgaatgaggccggccatcaggtggtggcgacgattttcacccacaccccggttgcggtgagtgagccagctgctgagatcgagcagattcgttggctcgattggagtgtcgacgccctgcctgatgacctggccccgctgctggtcgaggcagtcatcccgtggctgcggcgccgtatccggtcggtcgctgtattcacgggtgcgaaggatggaaccgaccctcattatcgtgtcgaagcaaccgccttgggccggggtctcgcacacgccgggatcaccctggtttatggcggcgggaagg

SEQ ID NO: 342 - DNA, 1496 bp, Propionibacterium acnes
gggaatacagactcttcgactggaattaaaatggtatatggcgtgtccggtccgcacccagctccacgatgcgccataggggagccataacttcaccaatcgtatacgatatgagtgtgggtgagcatctaccggtggccgacagtcagatacaagcatgggcggatgaagcagaagctgattatgacctcagcatgcttccgccgtctcgacgtggtcgcccaccggtggggaggggcccgggcactgtggtccctgtgcgcttcgacgcggacactctcaaggcgttgtcacaacgagcccatgacgaaggattgaccacgcgttctgacgcgatccgtgctgcggttaaccagtggctcggcctcggctcgtaaacattatcggcgcgacaaccttactgatgacgctgttggttacgccgtagagcacatcttgtactcgtgggcgctcgacgatgctgatgatcctcgttgctggatgatgattcggtgttgacccagctggcctcctcatggagctagttatcctcatctacgacgatggctatgaactcctgatccacgccatgaaagcccgccctcagtatctgagctacttcgctatctagtgttgttgggcgagttgaactcaacttttctccgacgcaagcgccaataaaaggctgatccatccgaataccaccaaacacggctgaagtgtggaacagattcagcaagacagggtgcggtgctcgggtgcgttggggagatgaggatattcaggcttctggcgggatgtggcttgatgacgtccaggatcaccggttcggttttgaaggtgccttgcattaatgtcgacagggtcgtacgactcgaggactggatcgaccagcccgttgcgtctgaagaacttcatccaccccggtggagctccggccgcgtactggtgcaacggatcattagcatgggtagcgtgagtatgccttcgatcgtggtcagtgctgtcatcatccaagattctgacgggcggcttctcactgtccgtaaacgaggcgccgaggcattcatgctgccaggcggcaagccggagcccggcgagaactcgcgtcaggcagtagtccgggaagtgcacgaagagctcggcgtcgcattgtcttccgacgacctgcgtcgggtgggagtgttcaccacgcgagcagcgaatgaggccggccatcaggtggtggcgacgattttcacccacaccccggttgcggtgagtgagccagctgctgagatcgagcagattcgttggctcgattggagtgtcgacgccctgcctgatgacctggccccgctgctggtcgaggcagtcatcccgtggctgcggcgccgtatccggtcggtcgctgtattcacgggtgcgaaggatggaaccgaccctcattatcgtgtcgaagcaaccgccttgggccggggtctcgcacacgccgggatcaccctggtttatggcggcgggaaggtcgggatgatggg

SEQ ID NO: 343 - DNA, 1526 bp, Propionibacterium acnes
cgcacggctgctcgcacccatggcggccgccagatgcgcgccgcctccacccgcgtcctcaccatgtcctgcgcaatcgtttgcgccctaccccgaaggggtcaccactacaggaaagttaagttcctagatggtcaccaacgcacgcgcaggcgcgtgcgaaggccagcaacaccagagaagaaacccctgtggctgcaaaaactcgcagccctcctcgaccagcacctgccctggctggtgagaaaccatcacatcggccgactgtgccacgccctcaccgccctgggcatcgacgaacactggcaacccgcagacctcgacgccctcctcgacgccatgaaccgcaggaaccgtcgcctcggcctcgacgtgccatgcgccgacgaccagcacaaccccttgggactgttcatccaccaggcccgagacaccctcacccacgacaacccccatgaacgccgcctggcccgcgaacaccaccgcgcccaactcatcgacgaccaactccgccgccgcgcagaaaccgccacctgcgcagcccgcctcgcagccgagcacgccgaccccgactaccagacccgccgtcgtgaacgcagggaaaccctgcgagccacactcagggccgcccagcagcatgtcaggacacactgatacccgctcatacacacaccatgaaacacgacaagccacctgacagtatcagctgcaagacgcatgacaacatagaaggatatgatgaaatacacatagacacaacccagcacagcagtttcgcaacaaatcatgatagtctcatggcagtatcgcttgatacacacatagcatcactcccacataggcagttatgctgatatactcctactaggttatccgtccaacatgctgagtgggttcctgtacagcatgaaaggagcatggcatgatatgggccgttctcaactgcaagggtggtgtcggcaagacgaccagtgccctcctgctggcggcagccgccgccaagcagggccacaccaccctggtggccgacgctgacccccagggcaccgcatcccagtggtcagccctggcaaccaaaaacgacgaacccctgcccttcccggtgcaagcggtcaacatcgccaccatggaggcactgcccaccaccaccgacgcccatgatctcatcctcgttgacacacccccctcggcaggcgatctgatgttccaggcatgccgcatcgccgacctcatcatcatccccaccgccacctccggacccgacatctcccgaacatgggtcaccatggacgccacacaaggcacaccacgcgcgatcctcctcacccaaaccgaacacaaccgtgtcgtctaccgccaagctcgcactgccctcgccgccgacgacaccgtcgttctcctggaccacgacatcccccgccgtgaatccatccgcacagcatggggcaccaaccccccagacgacgtcatcacctactacctgcccgtcctcaacgaactcatggaggccctgtcatgaccaccaa

SEQ ID NO: 344 - DNA, 1473 bp, Propionibacterium acnes
cagatcactagtcatggcggggtgcgtgatacccggatatcggtcagtgatgacggggccactgtcacggtgaccgtctcaggtcgggccccatcgatgctggggctgcatcttccggctgtgtcgtcgacagcgtcgatgcccaaggagcgcctgtcgtgaggcgaagtgagcgcggtggagcaagtctaagcgtcgaggtgctcatgtgggcgccgatcgcgctggtgatcatcgggtttgttgtgggtatcggccggatgtcgatggcccaggacgcggtgaatggcgcggcgggtgctgcggcccgtgcggcgtcgttggagcgtgatggacagtcggctcagtctgcggcgcagcaggcggcgtcggcgaacctgtcgtccggtgggctggcatgtgcgccgaatgtgagcgtggacacgtcagtgtttgcccgtcctgccgggcaggcgggcacggttcacgccacggtcacgtgtgtcacctcgctgggtcttgggttcgggtcccggacggtgcacgcaacggggtctgccccggtagacacctatcgggaaaggagaggctgagatggcccgtgatgagcgtggtggcggctcggtgtcggtgtggatgctgctcatggtgccggtgattctggtcatggccggcctggtttttgacgggtcccgtcagatatcggcaacccaggcggcccaggacgcggcggttgcggcatcccgcgccggaactgatgcggcagcgacaccgcagcttgctggccacgacggggcggccgtagcagtccaagcggcccgccaggcactatctgctgccggggtggacgggtcggtgcaggaggacgggtcgaccatcacggtgaccacgtctcaaagtcggccgacagtgttcctgtcagcgatcggaatcagccaggtaagggggcatgggcaggcccatgctcagcttgtgggaccgggagaacgcccatgacagtgatacgtcgtatcggtgccctggtggcactgcttgtggtgatagccggcttaccggccgggctcgtggccgcaggcgccccgctagtaccggcgggcctgtcatgggcccatgtgcggcatctgttggttaccccagacatgaccgggtcggtgctggtgtggctggtcagcctcatcggctggatcgggtgggcatggttcgccctggccgtcgcagccgaagcggtgacgatgctctcagggcagcggctgcactggcacatgcccggccctcgcctagtgcgccgagtggcagccggtcttctcattgccgcgttcgcggccgcaccggcagccacaagcacggctcacgccgccgaggccacccatgtggcggtcgccgcccaggctggaccggcacacgcggcccccgcccaggacagccccgccaccacctctcaggccccggacgcctccaccactccgaaaatctggaagacctacacggtgcggg

SEQ ID NO: 345 - DNA, 1515 bp, Propionibacterium acnes
aaactggccgggatgaggatgacggccgcgccgacacttcggagcgaggtcatgtgacgatccttcggtagctcgacgggttgccgtagatcttttccacgttgatgccactatgtgggttgtcggcgctaaccatttggcctccaccgatgtagacggccacgtggtgggcagggcttccccagaggatgaggtcgccgactttgagctggtcacgggccacagcagtgccgactttctgctggtcggcggcggtgcgagggaggctaatgccgatacgccggtacagcgccgaggtcaggcctgagcagtcgtagccgccatcggctttgccgttgccaccccacacgtaggcgtaggagttgttgtcggcgatcgatttggcccatgccacggcttcggccaggttcttcgacacaccggtctcgttagcggccccggtggcacagttgtttgacaggtgccctgtagtagtggatcccactatttgtttggccatggtttcccatttggcgtaggcatcgggcagggctgagccttgcactgcctgagctgcctgcgtcagcggcatcttctgccagtcagcgatgtcgactaaaccgggaatgtggaatccagggccgccggccgatccggggccagcgtaggtgatggtgtggcctttcaagaacgcctcggtggcgtaggcatcattgttgacctgatccagagtcccgtaccagcccggcaggatgcgctgctgaaaggggccggcgtcaccgtcaccgttagccttcgctgaggtagggtcggccccaagatctgattcttgtttggcggtcatgatagcgatgaccgctgcctgggtaggcagtttgtcacgctggaccacagtgacgatggtggtcacgagctgcttctgcctggccgtgaggcctccggcacccacagtgcctccggtgacggtacccacgcaagcatccccgccgacactgccaccgccgccgccagagttgtcgtcgagggccccagagcctactgacagcagcggcacaatgatcacggtcgctggcaagaccgccaggcccgccagcatcagcactgctgcactcaccacggcgatcacgtgagatgctttcaacgctgcccacctctcgctggtttgagggggcgacgcctgctggtacgcacaggcttggttgatccagtccgccgttgattggcaggcctgggtttgatcggcttgctgggacccggtttgggctccggagtcttaggctccggcttcacatgcctaggcacttcggctgcggtgggaggagtcagcacgtggcgtaccggcttggtgaccttctgggcacccgaaacaaccggcttagacaccaccttggcacctttgaccaccggtgcggctgccttcgcgccggccttcttgactgcacgatgcgctttgatagccccggcctcggcccggccaaccctactagcagtagcatcgagggctctgtgacccgtcgttgccctcaccggtgcatc

SEQ ID NO: 346 - DNA, 1791 bp, Propionibacterium acnes
aagggtggcctggtacccggggaacccgcacccgcgaccctgtcgaactacgccaccggccaggccctcaagaactacatgaccttcatgcaccaaatctcgggtctaggtctcacatggaagtcgggagcctcaaagatcactgtggtgcgggagaaaaagggtgataccacctaccccgaggccgctatcgccttggaatcgtgcgaagacggcagctccatccgatcggtggaccgccacggacaggctgaccatggccggctcacacacgtcgacagttggtatgcccgcgataagaagggcaccatcaaaatgatcgcacgtaacggagtggaggtttcctcatgcgacgtcaagtaatcaccgcggccgtgctgggcctgaccctggccaccacctccctgcccgccctcgcagataatggagacttcagtggccatacagacacggatggtcctggttacgatgtgcgtactgaggtggattaccatcacaccaccggtggtgcgggtgggggtgccacgacagggggccatcatgggggcaaaacccacggtgatggtgaaggtgaggctattgatgggcgttctcgcgccgatgccgaagccgaactagacgaagccgaccgtaaccaggacttgacttgtgatgtcatgctcccaccggcgccgaataccccagccggccaggaatgggcgaaagaatgcaatcccccagcgaaaaaggggcagaaggccaccccgaagcccgacccggtgttagtgggccgtcacgcagccttgcagctcacccttcccggcgcggcccctcgtatcgatccgtcccccgaccttaaccggtggcactcggcagcagtgggccaggctttgtggttgtcagttgatgaccccaccgccactacacagaaatcgatcacgtttatgggccaggttgtctcgttgagcgccaaacgtaacggtttgtcgtttgatatgggtgatggtcatgtcgtgcactgtgatgccacgacgacatggacggagtcggtggaaccggggaccccctcacccacgtgcggttacacctaccaacaggcagccccggccgggggctataaggtcaccgcaatcacgtcgtgggatgtgacctggtcggtactaggacacacgggcacagtccatatcgagaaggccggtgggcagatgcttccggtcggcgagttggagtctgttgttacacggcgatgactcctgatagtccgacgctgtatgaggtgttgggggtctgccctgatgccactgatgaccagatcaagacggcgtggcgtcgtgccgcgaaagtgactcaccctgatgccggtggcactagtgaggcgttcgcggccgcccggcacgcctgggaggtgttgtctgatcctgcccggcgcaccgcctacgatgccgacctggcgggggaggatgatcccgacgacgaagccgccgacgccttcgacgttgatccgttcacggcatggccctggtgcgccccgtacatcgacgccacccccaccctgcgccacacctgccccggcacgatcaaggccatcgtggtcgccatcgccgggatcatggccggaatcggctggcaggaagcgctggaggccgtggtgtcgccgccggggtttctgggggcgtgctggatagtctcagtgccggttgtcgtcgcagtgacatggctggcagcggtgacgggtctggcatttttcaccatggcggccatctggtgtggatggtcgttgataggtggtgcgttgctgtggggccagacgtc

SEQ ID NO: 347 - DNA, 1079 bp, Propionibacterium acnes
caggtgggtttgaccgccagcgtcggattggtgctggtcgctgggctgatcaccactctcaaccgtcgttaccggacccggttcacccgtcagccccgcggcaaggccatgaccctgcccagcccggacgcccaaactgccgagatagcgctgcgcagcaccggggcgactgacactctgacgatcacctgcctcgaccaggcgctccgcgcgatcggcgcatggtgccaccactgcgggcacccgctgccacccctgctggccgcccgcgtcgatgacgaccggatcgacctgctgctatcccaggcggcccccgaccatcccgaggcggtggagctggccgccgacggatcggtgtggaccctcaccgccgaccggatcgacgacctgctagcccacaccgatgacaaccaagcggctccgtggccgtctctggtcacactgggacgcgacgacgacggcgcccacatcctcatcgacttggaagccgcaggaaccttgcacctgatcgccgatgacgaccaggtcgacgcggccctcgccgcgatcgccgtggaactggccacctgtgactggtccgacgaggtcaacgtcaccctggtcggccaggtgtgcccgggcctagaagacgcactagagtctccgaccctgacccgcgccaccgacgtggacgccctcctcaccaccctggaagctcgcgccgacgaccagcgacacatcctcaccgaaggaagccccctcgccgctcaccgagccgaccccgccatctccgacgggttcgacgccgaagtgatcctcctcgacaccgaactcaccgaagaccaccgcaaccgcctcgccagcctcgtcgaggctcttccccgcgtgtcagtcgccgcggtaacaaccagccccaccagcccagacgaatggtccctcaccctgacaggtgacccactagccgccgacgtggctcccctcggctggcacatccacccccaaaccctctcccccgacctgtacaaccgcgtggttgaactgctagacaactctgcggccgacgactacgcacccgccgactggtgggaccatgacgccga

SEQ ID NO: 348 - DNA, 593 bp, Propionibacterium acnes
gctgagaaaaattttgggtccgccctgcatatcggggcctcttcataccttcaaaagtgtgaagggaatacagactcttcgactggaattaaaatggtatatggcgtgtccggtccgcacccagctccacgatgcgccatagaggagccataacttcaccaatcgtatacgatatgagtgtaggtgagcatctaccggtgaccgacagtcagatacaagcatgggcggatgaagcagaagctgattatgacctcagcatgcttccgccgtctcgacgtggtcgcccaccggtggggaggggcccgggcactgtggtccctgtgcgcttcgacgcggacactctcaaggcgttgtcacaacgagcccatgacgaaggattgaccacgcgttctgacgcgatccgtgctgcggttaaccagtggctcggcctcggctcgtaaacattatcggcgcgacaaccttactgatgacgctgttggttacgccgtagagcacatcttgtactcgtgggcgctcgacgatgctgatgatcctcgttgctggatgatgattcggtgttgacccagctggcctcctcatggagctagttatcc

SEQ ID NO: 349 - DNA, 1791 bp, Propionibacterium acnes; identical to SEQ ID NO: 346

SEQ ID NO: 350 - DNA, 1079 bp, Propionibacterium acnes; identical to SEQ ID NO: 347

SEQ ID NO: 351 - DNA, 593 bp, Propionibacterium acnes; identical to SEQ ID NO: 348

SEQ ID NO: 352 - DNA, 1515 bp, Propionibacterium acnes
tggaccaggtttgcggggcatgcgcgcatcggtgatcttggccgccaccaggtgttccagattgtccaagtgcccggagtcagaggtcagcagaagagtagtcacctcgaccgcggtggctgaggcgatctgagctgtgcggcggtcgtgatgggtggtgtcagtgctgacagctgtggtgggagcggatgccggggccgccgaacggaccagggcaacggggccgcatgcgactccgcacagcacgagggcaaggaagcctttggtggccatcgatccggtgtggggccagggacccacgttttcctgtgcctgttttttcttggccgaccaacggcgggacttagggttagcggatgcaccttctggggtgcatgctcgtctcaatcgcatcggtcacctccttcactggatgaagggaccaaggaggtgaccgatgtgcggtcgaacccgaaaaagttcaaacttttttctgggtctgcctcaagtacgacagaaggcctgcatcatcacggcgttgtggtagcagatcttgcgtcagcgcaaatgcatgggcctcgtaggagtagctcttaggtaggtcccggtggttgcggccagggcgagggtgtcgggtatgtgtagcgctagtcccgggttcgtggtgtgagggcttttgggtgctgacatgcactacccattgctagacgctgtgctgtggcatggctggacgtctagcagacgggttgacatcacctttaggctggcagcgcccgaggccgcaggccagaggaagcggacagcctaacgattgacgtccccctctcctttccccaacctcctggagtcgatgacccggagatagatcgatgtctatgcatcggtgcatcgatatacctatgtatctgtctgtggtttttagaggccactcccgtcgccccgggccgctcagcgataccgcaaggctgtgtgggatcagctgtgccgctcccccgacatggcagacagcaccgttgcatgagaactgactgacactgtggcgccgcggaggtctcccgcggcgtccgctggggcgagtgcatgcctgtcagctcatcttttatcgtcatgtttccccttgtcagagcggtctttgcaaagtgacaacgtcaggggtcttgacgacaacatcctcgacaacatcgtggcggtggtctgtgtctcgtcagttcaacgcaccggggaaagaggcaccgctgatgttcaccaccacaaacaccctcaacgatgaatgggaccagattcgcgccactgagatcgattggcatgactgccctgaactgatgcactgcatcgacgttgatgatgtgttggccgtcattcctgccgcccccgacgccatcttgggctacctcattgcccgggctcagggcggtgacgagttggccacccgcactatcatccaagcgttcacaggcaagcttattttgatggccacggccaccaaggtgcgccgtactaatgacggcttcaatgatctgttggcgggtctgtggg

SEQ ID NO: 353 - DNA, 1766 bp, Propionibacterium acnes
ttaactagggtcattgtcggtgaggtgcgcggcaatgaggcctcggccatgttccaggccatgcagtcgggtacaggcaccatgagcagtatccactccccgcgagcctctgaggtgccgtcccggctagcccaaatgatttcgatgggcccggtctacgatctggatcaggccatgctgcagatcggtcattcgatcgactacatcgtctttgttcgtaagcgtgacctgcctgatgggagccggctgcgatttgttgagcagatccgttcagtctcgcctggtgattcgacaactcccagtcttggcgaggtgtacacggctgactcgtggacaggccagccgcttacgccactcatgcctggttcggccgccgacgagctgtctcacttcgcccgagacctggattactgcgaggcccactcatgaacactcccgcactaaccagcgccctcatcgtgaccgggctagggctgatcctggccatcgacgggctggtcccggcgccgcctcgacctggtgccccgctgagcccggcccaaaggtgggctcggctcacccaccgtcccactggtgcggccgggcgtcgccgggatttgcgttgggggttggctgttcttgtcggtgtcgtgctgtttgtgctcaccgggtgggtggctgcgctggcgctgggccccatcattgtgttgttggcccccaccctgctgggggcggccccaccgaccgatattccgctgatggaggcgctggatcggtgggtgcgtcaggtcgctgcggtgctgccacaggggcgagacatcatcacagcggtgcggatctcacggccgcgggccccgaagctgatcgccgggtcggtggatcaactggtgtcccggttggatggccgtatggagccgagggaggcgttccagcggatggccgacgagctggactcggctgaggctgacgcggtgctggcctcactagcgttggcggccactcatccgcggggagcctcgacaacgttgaaggctattgctggcaacatccaacagcggttgaaagtgctgcggcaggtggaggctgaacggtctaagccgcgtaactcggtgcgccagatcacactggtcacgatcgccatgttcggggggctgctcgtgatcggacggtcgtttctggccccgctggcgacccctcccggtcaggtgctggtggccgtggcggtggtcatgtatgtcatcgcactagtgcagatgtatcggatggcgcggccccgtcgacgcacccggatcatggtcaggaggacccgatgaccattactgctttgtccctgctagccggggccatcgtcactgtcggactgctggtcatcgtggcagcgttccgcccagccccaggccctgacctggttgccgctctggaggtggtgtcgggtcgcacctcaagcgtcgccgagaacgtcgaccagacccggatcgggcggataggtcgcagcgtgacccgcacattccatgtgtcggtgtccccggccatgcgggccgcactgcggctccaaggcacgacccccgaagcgttctacggtcgacgcctgatctgcgcactgatcggggcgatcctgccgtggctgctcaacgcggtagccatcgcggtaggggcgaattccccgaacctactcatcccttcggcgctgtgtgtggcgttagctggcgctggatggatgctgccggcagcacggttgaaggctgcggccgggcccaccaacgatgactcgttcgaagcgctgctgg

SEQ ID NO: 354 - DNA, 1453 bp, Propionibacterium acnes
catccgtgacaccgatctggtatcggtgactgtcggccaggtcgacaacgtatcaacggttcccgcagaccagctcgactcactggtcggcaaacgcgccacggcagatcttcgagccggatcactcttgcctgctggggctatcggcccggccgatgtcgttccagctccgggcaagtcgctggtcgggctgaagctagccgccggacagatccctatcggagaccttgctgccgggacgaagctgcgcctgatccagacgtcggcacccagcggctcatccaccaccactgatagcagcaccaataccgatggccagtcgtgggaggcaacaatggcgaccggcaccaaaaagaccgagcaggtcaccttgatcaacgccgaagtgaactcgcgtgatgccgcccggatcgcccaactgacgtcacagggccgtatcgccgtagtgaaggatccgatccgatgagcaccattgttttgaccagcgtctcgggagccccaggggtcaccacgacagcgatcgggctgggcagggtctggccacaatcgagcctggtcgtcgaggatgacacccaccacgccatgctggcgggctacctgcgagcctcccagcacgccgaaccgaacctggccgcagtggcgaacctgacgtcgactccaaccaacgcccaaacggtgtgggaatctatcgccagacccctacccaccgatgacccagtcggcgggctgcgacgcaaaggcatcctcggcccgcccacgccgtggtctcgcgcaggcatcgacccccgatggggattcatgctggccctgtggcggcaactggaggaggctggcatcgacaccatcatcgatttgggtcgcctagccacaccactgacctcaacgccacacctgatcgccgcacccatcgtcgaggacgccgacatgatcttggtgatgatcgaggcgacactacgcggcatcgccggcgcccgcacgatggtggagggactcgctgagcagatgaacttggccggcgcctaccgacgtctcggactgcttgtccaccgtggcggccaggcccgcggcgtcgccgagttcaatgacaaggagatcacctcggcgttacgactcccggtcatcggggccattacccacgacccggccggagccgcccaactctccgacggggtcgggcagcggttcgacaagtcacgtctggcccactcactatcaaaggtggcggccagcctcgtcgatgccataaacaagcgccacgctgatgacgaggaggatctgtgatggccagttttgctgataatccgttcgacaagctgcgctcccaggatgcggcaagagcttcggtagagcaggagcctgatgccggattagcgtcggagttgttttcgacgtcgtcggggtgggccagctctcagcaggtgtcccaagctcaaccggtgatgacccgttcgga

SEQ ID NO: 355 - DNA, 1466 bp, Propionibacterium acnes
tctggggagtctgggcccggaagggccacgggtcggggcaccatcgagggcagggggtggcggcgggtgacggtgatggtgtcgtgttccaggtcgaagtcgctgcgccactggccgagcatcatcgccgaggtcaccgcggccaggcgcaattggatgttcgggctggacaaatgggcgccacgttggtggtgaatggtgaagccgtccaggttcccccgatcggttttccaggaatcgacggtgaccgccgacccatagatctgagtggctacttctttagcccgttccttgtctcggtccagatcggttttgtcagggtcaggggtcggggcgcggtattgcaggacgaaccggccggccgggatcgttgcggatgtcaccgtgaactctgccggcgaccaggcagccgcggccgcctgggtgagggccattggcatggtctcgacggcagcctcctcgggggggatggtgagggtcaggcgtcgcggatgcgtcttcttgcgattccatgtgactttctgcctcaccggcaccttcgccgccgactgaatggctaggcgagctgattcggcagtttcggtacgccggccagcgcgtagcgcccgtcgtgcgtgaaggctgcccaccacagcacagcccatacacggcagccaccagcgcggatcagcggctgctgcatagcccccggtagctagtaccgcacctgaccagccggccgcgatacttttccacgccggtttcgcgccaccaggaccagcgttatggacggtctgcttcgaggctgcggagggacgagacagcggagtgctggtcatgccgcggcctccttgtggcaggtcatttcacaggcatgccggccagcgatgatgccgtggcgcaccgccccggtagccgcatagaccgcgcacaactcaaacacggggcacccatcgcaggccgccgggttcatgctttctttgtcccacgatggtgggtcatcggtgcacggcacggccaggccatcctgttgagcggcgctgatagcggtgaataggcgcagctgggcgcgaacttggtctggggtcaggttgacggtgcgggctacacgcatggggttccttcctcttcaccagtgaaggttccctagacccggccgatgtgcggagggatttcagtgttttatcgaggtgaccagccagccggtctgcgctgcgggttcaggtaccagggtcagatgcagcatggtgtggtcggctaggggcacggcgaccaggggcccgtcggcgctcgccccggtgagggtgggagttccggccacggtggtggcgggaatctggttgggtttcgcggccatcagggagcccatgagggtcggggcggcgatctggacgagggcgactttgcgggcggcgggatcgcgggtcaaccagccgcgggtgaaggtgagcgcagccgacgtgatatcggggctcagcggggctggt

SEQ ID NO: 356 - DNA, 908 bp, Propionibacterium acnes
ccccaatgcccccacaacgatcagcacaccaacagcgatcatcaggtgggcagcactaactgatcccaacggaccaagatcaaacaagccctgcccgggagcgccgagcagtccgtgggcgcgaagccatgctccgagattgccaatgatcttggggatcatcttgttcagtagggctatccctccgatgccgacaacgaggaagacgaggatttcttcgcctgcgttgtttcttcctgtgtttgcggtcatgctgccttctcggggtggatggccagccagctgatgaggttgtcggtgatctgccctgagatttggatcagttcgacttgcccggcctgccatgcccgcgatgtgccggccagcaatgatgctgggacccctactgcgcggccacgggatgcaacctcagccaaggcggcgcgtaactcctcgacggtgctttcgatgtaccaactgccgtcagtactagtctcagcggcatcggtggtagcgataagagcatcggtgaggtcgtcgacggcgcggtccagatcagcgatgtccggtagggctacaggagtcatggtgtgtcttccttctagggtgccttcactggtgaagggtccctagccccggccgatgtgcggttctgtgggaaaaatgcttcccattggtccgtcttagttaggaaacttggcctaagtgctgtcgagggtcgcgtgttcgtgaccggttcgaagacactgccgccttgccttcttgtcagtggcgtttccgagatggggtcagtgggcgatggctaggccgatgagggcgccgctgcacaggctgggtgccaggggaggaatcgggtggtgtggtgtcggaaccggtcgattagggcatatagggcgatcagggtgaggccggctatgacagtgacctgg

SEQ ID NO: 357 - DNA, 1602 bp, Propionibacterium acnes
gacgccttcggcgtcgggtgagcgcgtggataggcgccccttcggggcacctgtaagcctgtatcgctgcggtttacagccttggccacccgaaaggggcggcaaggggccaggaggggcattctgcgccgctgatggcatctcacatgtgagttattctctcaactatccttcaagtcaagcgtattagattatttatccagtactcttgacagtctgtctatcgggctatatatttataagcagaacgagagatcgggaaaggaatcaacgatgaagtacaccgcacacgtcaacatggtgaccaagccctacatcggacttcccactacccgaaccccctacaccctcgtcgacgccgactgggccacaacatggatgatcgacgaaacctacgaagcccactaccacggcaccagcgtggagatcagcatctacggcgaaggccccgactgctccgtactcaccaaccgcatctacaccgaccagcccaccgatgtgaccgctgcactcgccgactacggcttcaccatcgacaccaccaacacatccaaaaccatcctcacgctcacccgcacagccaccatctcccacctgctagccatcctcgatggcctaccccaagctgaggggactcactggctcaacactcaacccgacctccaccacatcaccctcgacgactccaccaccggctgggccaccaaccgcaccgacgacaccgacaccggcgtctgctacgacaccagcacccacaactggcagatctgctgacagcatgacgggcctgcccttgaggggaagttggactctgcacccatttcagccgggtacgttgccggctgggcgaaggaagcagacggcgccgcgattgaagctgccgccgagcacgtcgcgaagacctcccacgcgattgccgaggcgttgcagctcaccgcacagtgagccccacggggcgaccggctcaccccggtcgcccctcaccccccgacaggggaaccgttcccgccgcctgaatctccatacccctgatacgtactacgcggggtcgaggagtggactcccccaccctcgtgtagtacattgtactatagacgtcttacgaggtgacaccatgagtttttccatccgtttaaccgaccatgagcgccgcttagctgattcctacgcccacctacactcgcagtccctgagtgaggctttcaagcaagccctcttcgaccgcatcgccgacgagttcgatctgcaagtagcccgtgaggcactcaccgactacgccaacgacaactaccagtctcgtcccatcagcgagctatgggacgagtgtgacctatgacttggcagatcgaaaccactagccggttcgataaagaattcaaaaagctagaccgctacacccaaaaactcattcacggctggatcacgaaaaacatcgacaacaccgacgatccccgccgccacggcaagcccctcaccggtgatctttctggactgtggcgctaccggatcggtgattatcgcctcatatgcacactcaacgatgaccgcctcatcatccttgccctgtccatcggtcaccgccgcgacatctaccgataagcc

SEQ ID NO: 358 - DNA, 1452 bp, Propionibacterium acnes
cgctgatgaggctgccgagttggcgtggcggttcgtggggtggtgtcctcagctggtaggggcaccgaagaaggtgcgtggccagctccgtcagctggtcgctgccgagatccgccggaatccgggctggctggatgcgccagcgttggaggttgttgcccagcgggtacgtgctgaaggtgcgctgggggtccagcactgcgagattgtgcgagccgagctgcacggggtgatcgccgaccagaaggccgcccccgcccgccccgacgccctgcacgcgcgggagcccaagtggtgggacgacgtgtactacgaaggaaacacaaccgtgtggtacgactctgacgaaaccagtgacgacgacgaggcgtggaaccggtcgcaggtatgtcatgttgctgagcgtgacgacatggctggcgggattgctaccaacctgctggcctcccacgctgatgatccgatggcctggctgactcgccgtcaaaccatgctgatggctcgtttcccccacgcccagaacgaggtcatcgcgatgtgccacatcgtgcgcaccgccctggaggccgacatggccgccggaacccggtgggaggactgatgagggtctcccggcgcgccctcatggccgtggcccgtgccgacgctgccgcagcagaccatgccaccggccgatgggtggccacagccaacgccaccgtcgcccggctgaccggactgtgcgaacgcaccgtccaatacgcccgcgccaccctggtccacctgggcctgtgccgcgtcgtggccaccggccgctacctcaccgccgacgagcggcgcacggctgctcgcacccatggcggccgccagatgcgcgccgcctccacccgcgtcctcaccatgtcctgcgcaatcgtttgcgccctaccccgaaggggtcaccactacaggaaagttaagttcctagatggtcaccaacgcacgcgcaggcgcgtgcgaaggccagcaacaccagagaagaaacccctgtggctgcaaaaactcgcagccctcctcgaccagcacctgccctggctggtgagaaaccatcacatcggccgactgtgccacgccctcaccgccctgggcatcgacgaacactggcaacccgcagacctcgacgccctcctcgacgccatgaaccgcaggaaccgtcgcctcggcctcgacgtgccatgcgccgacgaccagcacaaccccttgggactgttcatccaccaggcccgagacaccctcacccacgacaacccccatgaacgccgcctggcccgcgaacaccaccgcgcccaactcatcgacgaccaactccgccgccgcgcagaaaccgccacctgcgcagcccgcctcgcagccgagcacgccgaccccgactaccagacccgccgtcgtgaacgcagggaaaccctgcgagccacactcagggccgcccagcag

SEQ ID NO: 359 - DNA, 1595 bp, Propionibacterium acnes
cggcgtcgggtgagcgcgtggataggcgccccttcggggcacctgtaagcctgtatcgctgcggtttacagccttggccacccaaaggggcagcaaggggcccggagggggcattctgcgccgctgatggcatctcacatgtgagttattctctcaactatcctttaagtcaagcgtattagattatttatccagtactcttgacagtctgtctatcgggctatatatttataagcagaacgagagatcgggaaaggaatcaacgatgaagtacaccgcacacgtcaacatggtgaccaagccctacatcggacttcccactacccgaaccccctacaccctcgtcgacgccgactgggccacaacatggatgatcgacgaaacctacgaagcccactaccacggcaccagcgtggagatcagcatctacggcgaaggccccgactgctccgtactcaccaaccgcatctacaccgaccagcccaccgatgtgaccgctgcactcgccgactacggcttcaccatcgaagccgccaatacatccaaaaccatcctcacgctcacccgcacagccaccatctcccacctgctagccatcctcgatggcctaccccaagctgaggggactcactggctcaacactcaacccgacctccaccacatcaccctcgacgactccaccaccggctgggccaccaaccgcaccgacgacaccgacaccggcgtctgctacgacaccagcacccacaactggcagatctgctgacagcatgacgggcctgcccttgaggggggggttggactctgcacccatttcagccgggtacgttgccggctgggcgaaggaagcagacggcgccgcgattgaagctgccgccgagcacgtcgcgaagacctcccacgcgattgccgaggcgttgcagctcaccgcacagtgagccccacggggcgaccggctcaccccggtcgcccctcaccccccgacaggggaaccgttcccgccgcctgaatctccatacccctgatacgtactacgcggggtcgaggagtggactcctccaccctcgtgtagtacattgtactatagacgtcttacgaggtgacatcatgagtttttccatccgtttaaccgaccatgagcgccgcttagctgattcctacgcccacctacactcgcagtccctgagtgaggctttcaagcaagccctcttcgaccgcatcgccgacgagttcgatctgcaagtagcccgtgaggcactcaccgactacgccaacgacaactaccagtctcgtcccatcagcgagctatgggacgagtgtgacctatgacttggcagatcgaaaccactagccggttcgataaagaattcaaaaagctagaccgctacacccaaaaactcattcacggctggatcacgaaaaacatcgacaacaccgacgatccccgccgccacggcaagcccctcaccggtgatctttctggactgtggcgctaccggatcggtgactatcgcctcatatgcacactcaacgatgaccgcctcatcatccttgccctgtccatcggtcaccgccgcgacatctaccgctaagcc

SEQ ID NO: 360 - DNA, 1388 bp, Propionibacterium acnes
gggttgccatcggaataccgtggaccatcccggcgcatacacccagacggtccaagatccaatccacgctcacccgcgacgccgctaacgatcctcatacaccgtagatgccgttctgagagccttccagacccgcacgtgggtttattgcaccgagacccaaatcccctcagaagcgatcctgaaaccgtctacgccccatttccgacggacgctggacaggctgggcggcttgtctcccgccgcagacatggccctggcatatgcggttgccgactggtgggatcagggattggatcacacggcagacggctggtccaaggcgggtgtgcaggtgcggtgagcggcagacgtgaccggtggggtgcactgtcatggccgggcatctgccgagccaccatgcgggccctggaccaggaggcagcccgctgcgaggactgggggaagacggcggcacggatgggccgtcgggatgcggcggccgaattcaccgagactgcggtgcagcatcgtggacagatgcaccacctcatgtcggcacaaaaagtgtgggtgtcgaccgacatggtgtcggctacactggacgccgcaggagacgtgccgagtttcgaggccgtcgacgtccctgccgccgggctcatgggtttggccagccccctgccgccggttaccctgcagcatccgctgtatctgcgcagcgacgagggtgtgacaaccttcactgatccggttctcgtcgacgcgctgggatggtggatggattctgggcgtgtgcacgtggtgatgtgcacacgcacaccccggctgcccaacccggtttatgcggtggcctccccactgacggtggtggagaaaatcacggtgcccaccggcatcgagttcgagaccatggagtccaggatcctgacccccggcggcgtgacaggcgtctcacggcagggcacacgcatgatgatccggttggcgtcatggctgggtgccgcgtgggtgctcatggcgactccgacggtgtcggagccgcaccctatggatggccggtggggaggcccagcaacggggcagacccggccgcgtgatcgggtgaccgtggtcgacatgcggcccatgaggcaggtgcacaccaccaccgaccccaccggcaggcggttgacgacccggcatgtcgtgcgaggacactggacacaccaaccctacggcccggcccgcagtctccgacgcctgcagtgggtcgccccattcatccgcggccccgaaggggctccgttcgtcggcaccgacaccgtcaccgtatggcgccgctagatacgcgggcgcggggggttgacgaacgatgcccccctctttgtgttgtgatcagtcgtgatcggcgggttttaggtcggggtagg

SEQ ID NO: 361 - DNA, 1578 bp, Propionibacterium acnes
tggataggcgccccttcggggcacctgtaagcctgtatcgctgcggtttacagccttggccacccaaaggggcagcaaggggcccggagggggcattctgcgccgctgatggcatctcacatgtgagttattctctcaactatcctttaagtcaagcgtattagattatttatccagtactcttgacagtctgtctatcgggctatatatttataagcagaacgagagatcgggaaaggaatcaacgatgaagtacaccgcacacgtcaacatggtgaccaagccctacatcggacttcccactacccgaaccccctacaccctcgtcgacgccgactgggccacaacatggatgatcgacgaaacctacgaagcccactaccacggcaccagcgtggagatcagcatctacggcgaaggccccgactgctccgtactcaccaaccgcatctacaccgaccagcccaccgatgtgaccgctgcactcgccgactacggcttcaccatcgaagccgccaatacatccaaaaccatcctcacgctcacccgcacagccaccatctcccacctgctagccatcctcgatggcctaccccaagctgaggggactcactggctcaacactcaacccgacctccaccacatcaccctcgacgactccaccaccggctgggccaccaaccgcaccgacgacaccgacaccggcgtctgctacgacaccagcacccacaactggcagatctgctgacagcatgacgggcctgcccttgagggggggggttggactctgcacccatttcagccgggtacgttgccggctgggcgaaggaagcagacggcgccgcgattgaagctgccgccgagcacgtcgcgaagacctcccacgcgattgccgaggcgttgcagctcaccgcacagtgagccccacggggcgaccggctcaccccggtcgcccctcaccccccgacaggggaaccgttcccgccgcctgaatctccatacccctgatacgtactacgcggggtcgaggagtggactcctccaccctcgtgtagtacattgtactatagacgtcttacgaggtgacatcatgagtttttccatccgtttaaccgaccatgagcgccgcttagctgattcctacgcccacctacactcgcagtccctgagtgaggctttcaagcaagccctcttcgaccgcatcgccgacgagttcgatctgcaagtagcccgtgaggcactcaccgactacgccaacgacaactaccagtctcgtcccatcagcgagctatgggacgagtgtgacctatgacttggcagatcgaaaccactagccggttcgataaagaattcaaaaagctagaccgctacacccaaaaactcattcacggctggatcacgaaaaacatcgacaacaccgacgatccccgccgccacggcaagcccctcaccggtgatctttctggactgtggcgctaccggatcggtgactatcgcctcatatgcacactcaacgatgaccgcctcatcatccttgccctgtccatcggtcaccgccgcgacatctaccgctaagcc

SEQ ID NO: 362 - DNA, 1665 bp, Propionibacterium acnes
ccccaatgcccccacaacgatcagcacacccacggcgatcatcaggtgggcagcactaactgatcccaacggaccaagatcaaacaagccctgcccgggagcgtcgagcagtccgtgggcgcgaagccatgctccgagattgccaatgatcttggggatcatcttgttcagtagggctatccctccgatgccgacaacgaggaagacgaggatttcttcgcctgcgttgtttcttcctgtgtttgcggtcatgctgccttctcggggtggatggccagccagctgatgaggttgtcggtgatctgccctgagatttggatcagttcgacttgcccggcctgccatgcccgcgatgtgccggccagcaatgatgctgggacccctactgcgcggccacgggatgcaacctcagccaaggcggcgcgtaactcctcgacggtgctttcgatgtaccaactgccgtcagtactagtctcagcggcatcggtggtagcgataagagcatcggtgaggtcgtcgacggcgcggtccagatcagcgatgtccggtagggctacaggagtcatggtgtgtcttccttctagggtgccttcactggtgaagggtccctagccccggccgatgtgcggttctgtgggaaaaatgcttcccattggtccgtcttagttaggaaacttggcctaagtgctgtcgagggtcgcgtgttcgtgaccggttcgaagacactgccgctttgccttcttgtcagtggcgtttccgagatggggtcagtgggcgatggctaggccgatgagggcgccgctgcacaggctgggtgcccaggggaggaatcgggtggtgtggtgtcggaaccggtcgatgagggcatatagggcgatcagggtgaggccggctatgaccgtggcgtggatcgtgtcgatgccggttgctgcggccggggctgcccacagtggtgtgatgcgcacgtcggagaagccgaagccgcctcgggagatgagccaggcgatcatccacgccgcggagatgacgacagtagcgatagcagcacgtatcgccgcagtctggttcgcgagagcgatcatggccacagccccgatccatccaacccagccggtccaggcgaggactgccggtatccatgtggtgatggcgtcgatgacggctacccatgccccgatggtggctagcagagcccaggccggccaggtgggtgctggggcccacgctacggcggcgatcatggttgtcgcagatgcagcacagacagcgatcatgcttcggagactgtaggtgtcgcggtaggcgattttgtcgggggtggcggtggccggttcgggcaggatgcgagtgagggcaggccatcctgcggtcgcaatggtcacgacggcggcgatccacacgatctgttgcatgggtctcatcatggcccaatatcgatgggtgtgggtggccgacatggggtcactcgtagaggggatcgaggggtgtgcgggcgagcatggcttcctgtgtgccgagcatgagggtgccagaatcctcgccggctgattcccagtcgacgatgatctgcccgctgtcgacgctggattcggtgatggtcacccattctccgtcgatattgatgagcaccccagcggccagctctgtggcagcaaccgggtgagg

SEQ ID NO: 363 - DNA, 1497 bp, Propionibacterium acnes
gataccgcaaggctgtgtgggatcagctgtgccgctcccccgacatggcagacagcaccctgcggactgactgacactgtggcgccgcggaggtctcccgcggcgtccgctggggcgagtgcgtgtctgtcatctcatcttttcccgtcacatttccccttgtcagagcggtttttgcaaagtgacaacgtcaggggtcttgacgacaacatcctcgacaacatcgtggcggtggtctgtgtctcgtcagttcaacgcaccggggaaagaggcaccgctgatgttcaccaccacaaacaccctcaacgatgagtgggaccagattcgcgccatcgagatcgattggcatgactgccctgaactgatgcactgcatcgacgttgatgatgtgttggccgtcattcctgccgcccccgacgccatcttgggctacctcattgcccgggctcagggcggtgacgagttggccacccgcactatcatccaagcgttcacaggcaagcttattttgatggccacggccaccaaggtgcgccgtactaatgacggcttcaatgatctgttggcggggttgtgggagacgatcatcacgtacccgttggatcgtcgccctgacaagatcgctgcgaacctcaccctcgacacgttgcaccgggttacccggttctggcgtgctgattcccccgatgaggaagaggctcacggtctggtgcccttccctgacactctcatcgccccagagcccgatgaggacgtcacagctagccaggccatcgccttggcggtggaccgcaactggattaccgaggacctagcccgcctcatgagccatatttactgtgacggtatgactggagctgatgcgggtcgtctgcatggctgcgctccagctacggtgcgatctcgatgccgtgatggtcgggccgtgttgcagcgcaacgccgagacgatcctggccgtctgctgatcctctcttgctcatgcctgccgccaccctacccctacctgctagaaacatagccatgtctccagcaacgcatctagcatatcgtctagcaattgatctagctatgtatatagctgatgatctagctatcatatagctgtgtctccagcccaaatgacagcccaatggcatgcttgccacaggaaggtgcgtcagcctcccgaaatactggaaggagctttaccgtgcaggacatgacctcgaccagaccgattgaccgatccccgttcgaccgcaccatcgcggtatggaaccacaaaggcggcaccttcaagacgtccgtcgtggcgaacctgggatacctgttcgccgccggtggcaacaaggtgctgctggtcgacatggacccccaagccaatctcgacatcgacttcggtacccccgccaatgagcgtgaacgaggcataggattagccgaggcgctacgtgaggggacggcccttcccccaccacagcatctcagcgaaaacctccacctggtcagtggcggc

SEQ ID NO: 364 - DNA, 1374 bp, Propionibacterium acnes
gacgggttcctgccaatcgatggttgacaagtcgtcggcggcttgttggtaggtaaggtggatcattggctgtttgagtgcagcgccatgccagtgtctctggccggcgtcgatccagatggattcgcccttggtcaggtgctggggtgcttgtccttcaatatggaccagggcaacgccgcccgtgacgtagaggccctgtcccttggggtgtgtgcctcagcggcaaacgtgacggcgtgggcggcacgcccggcgtcttccgtggcacgatcggccggatccatggcggcgcgcagctgctgttctgcagccaggcgtccaggtcacggcgggcagcatcgacacccagggcagcctcgacggcttcagggctacgacgctggccgggctggttgaccgcagaccactggtgccgggcgtcgtccagatcatggccggcggcgtcgatgagggcggtggtggcttcggcgcagcatcgcctgatccactccgaacgtgacaggccagctgtctcggcggcactgtcaatgcgcgccaggagagatttcatgggcgctcatctgtagcctccagataggcgttgatgtagcgcagagcctgatccgtcatgtcgatggcggctgcctcggcagacgacacaacgggctgtggatgataagaccacccaacatagacggcgaacatcaatttctcgacagctttcatgaggtccccggcggcaaccgcatccgcctcatcatccgaggagaaccacttcaggtctgaacggctgtacatagcccctaggtcctgatgtgggtcgaggtccttggaatgatggaagttcctacacacccatcgccaaagacctcaacatggacaacgctaccttcaccactccctcatctgtgaagagccagtttatgcacggtgttgaaagaggcgtcggtctacgacgaatgcgggttaatggtcttgcggtgtggggcgctgggcgatggcatcgagaacgcgtgagtgggtggcgatccattcggccgcgtcggggttgatgttgcgggcgacggtgtcgatcgctgttacgtagtgggcaagcctgcgaatctcagcttgttggtcagggtgagcgctgatgaggggctcttgatgggaggcgcggttacggacgtggcggatgagctccacgttttcctcgaagtcgcgtcggctacgccccgggtagtgaggcatacctccgttacgtaagtcagtgagagctttccatacggttgcttccaggcgcggggtgagcagaaagcgccagttgtccagtgacagactcgccacgatctgatcaggggtcgcatcgagcctcgcgcgccgcagtcgcttctcggccctgtcgacgttacg

SEQ ID NO: 365 - DNA, 1569 bp, Propionibacterium acnes
gcccatccggtccaggcgaggactgccggtatccatgtggtgatggcgtcgatgacggctacccatgccccgatggtggctagcagagcccaggccggccaggtgggtgctggggcccacgctacggcggcgatcatggttgtcgcagatgcagcacagacagcgatcatgcttcggagactgtaggtgtcgcggtaggcgattttgtcggggctggcggtagctggttctggcaggatgtgggtgagggcaggccaccctgcggccgcgatagccatcacggcgaccacccacacaatctgttgcatgggtctcatcatggcccatcaacgccgaaaatgggtggccgacatgggttcactcgtcaagaggtgtacgggcggccgtggcttctcctgcgccgagcatgagggtgccagaatcctcgccagccgattcccagtcgacgatgacctggtcgccgtcaacgctggattcggcgatggtcacccattgcccgtccatgttgatgagcatcccggcggccagctctgtggcggcaaccgggtgggctgggctgtagaggaggtcgatgtcgcgggcagggtcgtcgggttcttcggttacctcgggtggggtcgatctggctgtctcggtgtcgtcggccaggtcggctcccaggatgcgttcccattcggggctggttttcttgcccgctgaggccatcgtctcgtcgatctgttcgtcagtgggccacacaaatttctttttggtccaggtcgtggtgtcgggtcgcagctgatccagcagttccaggtcttgcggggagtgggccttgcgggggtcgggggtgtagaagaattggacttccttgggggctgattcgccggataggtaggtgccgcggccgcgtttgccgaacgggattcccacgccgacgtgttcggagccgaacatcatgcgggctccgtcagcagacaggggtccggtggcggcacgcccggagaagttgtctcggatttcgccgcccaggaactcggcgtcggggcgttgggtccccagatcgacgtggatacggcaggcagctgccatgcgcagcagggagccgatccagccgaaaacggggcattctccgggcatcccagagaccttgatcgttgaccaccagtttttcgcgttgccgtagaactggcggtactcgtcgatgaggaccagcacgcgggtgaagtcggtctcgcgggccccttcttcttcgatgcggcggtagcggtcctccatgagagaccacagccagtggatgagggcgacctggtcggggacggtagtggcgaccatctcgatgttgggccactcccgcaggcccaggtactcgatgcgtttagggtcgatgacgaagacgcgccagttgcggcgggcaccctcgacggcgtcgccgatcatggacaccgtttttccggtacgggtgcggccggccttgagctggtgggccatgacaccggagatgtcccagaaacaggtgttgccgtcctcgtcgacggcctgggggattttctcccagtctggggagtctgggcccggaagggccacggg

SEQ ID NO: 366 - DNA, 1390 bp, Propionibacterium acnes
tgcccagcgtttctcggcgatgtcgatcatgtcttggatggttttgacccatcctcggatgggatcgactttggtcagtttgatcccttcgaggaactcgatgggctgggtgatgggcccatctggtccggcttcggtgtcccagccttcgtcgatggctagtttcagttcggcggtatcgacccatgtttcgtgggtggtgccgggcacgttgggccaaaaccatcctgctcgtcctttggtgcgtttgaccggtagtaggccgatgtcgtcccaccaggatggcacggtgaagcggatgtggtagcgggccgggtgccaggggttgttggtgaacaggtcgcgggcttcggtggcgctgagcagagtggcgggtgcggcaccgatctctccggtcactgatccggcatacatgaatcggccgtcgatgtacacgaagttagggatagggccggcaggcacggtggggcgccagcccttttcgcggtcctcggggttgccgtcgtcgacgcatagttcgtagcggtgctgaggggaggtgtgttggatgagtgcgcccagttcggggtccatcggctccatgcgataggactcgggggtccgtagcttccagaggttgattccttctgctccggggcggtccatgagggcccagtcgcggtcgattctggtggcgatgatgtgggttaattcgcgccatgcccagcgggcctggattggggtgagggtctggccagggaaccattcatcagcgaccagaatgtcgaggttgcggtcggtttctttgtgggtgaaccggcctcgggcgggccgcccggacagcatgaacaggccccgcacgtgccagtcctggttgaactcgcgggtgtgagcgggggtgtcaggcagcagccaggattgaggctggtcggggatgttaccgcagacgatcaggcgtcgggcgttgtggtgtagcgcggttgttagcaggtctgacagggtcgcgtgcttggtgcgtcgtccccccagcactggcaggatctcgtttccggccgcgtcgactccccgggcggtgtcgatgtctagccacactgtttcggggtcggggggccgatgtggggcgggacggcgctgctcctggtcgtctctcatggtttcctcctttgggccagggagcggccggcgtcgagggcgttcatgcgctcgcgttgttcttcgcgtagttggtagacccggcctcgtgacactcctgctgcctcggcgatggtggtggccggcaggtggccgatggcggcagcgtcggcaaggacgtcacgccaggccaggtcaatggttcccagctgggctagagcttcgtcgcggcggcgggtggcatcagccactacggaggcccaccctgtggggtggatgg

SEQ ID NO: 367 - DNA, 1289 bp, Propionibacterium acnes
cttcgacgctctggccgagtgggccgagagcgatgaggcgacccacaccccgcaaaccagccccgtgttccggggcaaggacgccgcgcgcgccagccgcgcattcctcggccgaggacggcccaccctcggctcagaccacgccaccggcgagggccggtcgccccgccgtcaggtacggctcgacgcacgcaccaacgcgcgactcgacgcctacgcagccgcaaccggcaccagcgcctcccagatcatccgcgacgccctcgctgactacctgcccgcctgatcccaccccaatccactcgggcgcctgtcagtgccccccttctgggtggtggtccagggcgtcaccgccccggaccagttgggtagtcatctcagttgaaataagcgattagtgatacgcccctcatgctttccggtgctgtcatgagcgtctgacaacagcgacacctcggggcagccgacggacagtcctctggctgccgctctgatcccatgcccacggcacgaaggtgtcggacagctcggtctcgtcatgtgcccaaatagcgtcgtgggcctgtcgccaagcttctcgggagccccacacgggcacgaccgggccacaccggtgtcctggtctccagtgtcgcgacactgtcgatttcggtacgtgcaatgcggcggcggtttgacggatcgacatcccagactcccgcgcgtcccagatcgccatgtggagagtatttgcctccagtgcggccgccacacttgcacgctctcgcgcacgctcgaatgcccgcctagtgctctcaaatgtcgtcacgacgcctccccctgaaaatactcagggtgtcccacggtgggacaccctgagtatttcataccccaactcgcctcaccacacgtcgacctcgacaccgatcaagcgacccgtatcagcgacattgccgtaacgctgccccgcctggtcctccagccacgacaacgcatcccgaaacagcccgacgtcttccaaagctaaaccacagtcgtagccgcccttgtcccccaaccgcacaatctggcgctcccggtggcctccctcgtcgacctcgatccacagtttcgcgtgcatccgctggcctcggccctctgacaggatctcggtgagcaggtcggacgcctgccctcgcgcatcctcgttactgcgggggaattggagtatgtgggaggaacggtggtggggcaggtttgtgacctcgtgacgcagcaggttgcgcttgtgcatctgccgttcgagacgctcgggctgacctgttgacggg

SEQ ID NO: 368 - DNA, 1226 bp, Propionibacterium acnes
ccgagccagtaaccaggaacgaggacgataggccgatgctggtcaggtcgcgatgttgaagtcatggagacatagttgcacagtgcgcggacaagggagtggcactatttctggcatgaatttagatctgggtgtccggtgaggcgatcagaacgcctccatgtactgtccgagtgtctacgatgcagcggacacagtcgagcagctggctcacaagtttccaggtgtccttctgcccctatgagggaagtcggctgctctcgcaacctttgagggctgctctggggtcggaaccagttacagatcgttcaagttccgggaactaccgccggtcacgctgattgattcccgggcgatctcgcttctgacgacagtggtcggtaaccgagaggcgtcctactctgaccccgctgctgcggtgagtaaatcacgggcgtcccggatccggccacccgtccaagtgccagccagcttgatcggctaggcatcgtcaaggagcgacgatgaggtgatgatgcgatgtgagcgcaccgcgaagtgaggtataaagaagccttcccgggcgcatgcgtcgcccaggaaggccaggttggcccctggacggctgaatggttgggcggatcaggctgtagcggagacgtgcagtacctcgtaggcgatggcgttggttggggtctggtctgcatcgtggctactgagttcgacgaggatgacggtccaggtggtgatgtcgacggcggtgacgcgggcgatggtggaatcagtggatgctgcaaggaagtcggcggttatgtcttcgatgcagtgggacggagcagtgctggtgggcaggggcacggtcttgacggtcaggcttcgggcagcagagtaatcggcggttccgttaacaagctggtggacggtccagtcctggatcgggtgccggccgaagtcgcgtacgatagccgagtaaccaagttcgccccagcagaactggcgcatcccctctatgtcgcgccagacgtagaagggcgcgtaggagttctggggtgcgcctttgaccttttcttggatgaggtaggccttgaactccagtccatggtagccgtccatgaggtgtccagtctggatgacgcggtcgcggatgatctgcatgtcatagtcggtgggcagggtgatctgatattgcatggcgtacatcagcggttctccttggtttcgtgggagtaggtcgtgggggtgacggg

SEQ ID NO: 369 - DNA, 1269 bp, Propionibacterium acnes
tagaccctctgctgagggcttcatcaagatccatcacgaccttattagtgtcggcgtgtcgggtaacgcgatggcgttgttcgtcgcgttacgtaaccagcccggctgtgatcagtggacccgtcactcgtacctgcggctagcccaatggtgcggctgggatgggctgtcggaggcggcgggctgtaagcgggtgcagcgggccgctgctgagctcgctagcggtggttggctggaatcgcgggtcggccatgatcgtcgcaccgctaagacgctggtgtggcatcggttgaccagccccgacaccgaccgctgggagcaattgccgcggattgtgtgggcgaggatctgccagatcgccggggagacgtcgggagagtgggtgaggcattggctggtgtggcggatgctggccggtcgtactggtgtggctcaggcccctacgtccatcgtggcccggttcctgggctgttcttcgcgccaggtctctcatatccgtggggctctcgttgatgccggtctgctcggctgtgacgaggtctcgggggcggcgagccgggtgtggttcccctcgatggccgaggagtgtgcagcggatcgtgaggtggtcgatggggccgtcgtcgatgctgaggtgggctctggtgaaggtgtcgaggagggcggggaacccctgtcgattttgtccacccacccctgtcgattttgtccacccacccctgtcgattttgtccgccaagtattagacaaaccattagacagtgaattagaccctgggtcgcgtcagcgtgtgaactcaccaacgcgcgcgcgcgcggcggccgagccgccgaagccaaagaaacccataccaccaacgcctgaaccagcagcccccgcttcagacagtcctgtgtcagcgcacgctgatgaggctgccgagttggcgtggcagttcgtggggtggtgtcctcagctggtaggggcaccgaagaaggtgcgtggccagctccgccagatggtcgctgccgagatccgccggaatccgggctggctggatgcgccagcgttggaggttgttgcccagcgggtacgtgctgaaggtgcgctgggggtccagcactgtgagattgtgcgagccgagctgcacggggtgatcgccgaccagaaggccgcccccgcccgccccgacgccctgcacgcgcgggagcccaagtggtgggacgacgtgtactacgaaggaaacacaaccgtgtggtacgactctgacgaaaccagtgacgacgacga

SEQ ID NO: 370 - DNA, 1195 bp, Propionibacterium acnes
gaacgccaccgtgttgcctttctgatcctgagtgtcggcatgcaaatcgaggtaggccagcgactgcaacggggagcctgtgaccacagccaacgggatgccggtggtacggcccaaccggtactcaaccaccgggatagatgcggcgaacgcggaggcgtgagtcagctgacggtaggcgttaagcgaggaggagaaccggccaccgggccgggcagcccacagcaagtcctcctgacggcccacgggacgcacccacgtgaagtcaccgaacaccggatcattgacgaacgctcctgccagctcctcggtggtctcaaagtcaggagacgagacagtgacggtgataagagcctggatctcgacctcacgctcatcggcggccagctcggcgttgtagtcgacgagcacctgagcggaatgctcgatagacatgagggtcgaagcctgggtcatctcaccgccctcgacgttgtcgagctgatcgaccgtttgacggatagcccgctgatttttctgcatcgcagcgtgacgggtccgggccactccccggatcgccacgtcgaccggcacgccagtgtcgtcgatacggcccaaaaactcgtaggcaggccacgtcatcgtgcggggcaccttacccagcacgatatgggactggtagacggtctcgccggtgtcggcaccgattttgaggacgcgacgattccacgcctgagccgtccgggacatgtgggagactcgcttgtcatcctcgctggccagcaggtcggaggtcgcggcctcatcgatgaccaactcccccagcgcggcacgtccaacctcatccatgagggcgattccctcgccaggggcatcatcacgcaaccgggtcgggtggcctgacaggtgctgccgaagccagatctgttcatcaacggtgaccgggcggggttggaacgctgccggcagtttcgcaccgaattccttagcctgacggagggcccactcccgtgcgacacggccaggagcggtggtcatgagtccggcggcttcggtgattttgttgagggcggcggtccaggcggtgtgggtgcgtattttctggtcttggttgagtttgatcgataggaaccacacgcgccggcctagggattcggtttcaggctggtcgagggtggcgtcgatttcgtcggcccacacggggtgttcgctcagg

SEQ ID NO: 371 - DNA, 1199 bp, Propionibacterium acnes
acccttccagcccagcaccacccactacaccgacacgatccacgaagctgaaaccgaacctcccatccccgtccgaaacatcaacgaactcatcaaccccaccaaccatgcatgaacgcacgatcgcctaccggccagccttcctgcgcgacgtgaagcggctcaaaaacaagcactacaacatgaacacacactcaaatgggcggtaaggtcacgaagtcgacgtggctgcctcacggatggcttcggcgagctcttggggtcgactccacatgggccagtggccggttggcagatccatcgcggtgaagttggtcaggtgcgcgacggcgctgaacatcggattgcctgctgcggccagctcgaggacctggacgctgggaatggagcagcagatcaacgtggttagtacatcatggcgagcgctattggacagcgcgacccgtgcccgggccacttgcgcgggttcaggaaccgcccgtgcccggaaccggtcaaggtgctcgttgctgaggccctctaaactggcctgcttgccgagagtatcgaagtcaggaagtggcagctcagctgtttcctcaggtagatctggtgcgaaggcacctccatcgctcatgggaccggagtccacccagacgatccgatggaccaactctgggtgcctgtctacaactaggctcaccggcccgttcgcgccactgtgtcccaccaggaccgcatcgccgcccatctcgtccaggatggctgagatggcgtcagcttggtcgtcgagcgtgcgcgtagtgcgctgggtgtcctccggatcgagacctggcagcgtcagccccacggctcgactgccagcagtgttcaataactcgactacctcgtcccaagcccaggctccgagccagtaaccaggaacgaggacgataggccgatgctggtcaggtcgcgatgttgaagtcatggagacatagttgcacagtgcgcggacaagggagtggcactatttctggcatgaatttagatctgggtgtccggtgaggcgatcagaacgcctccatgtactgtccgagtgtctaggatgcagcggacacagtcgagcagctggctcacaagtttccaggtgtccttctgcccctatgagggaagtcggctgctctcgcaacctttgagggctgctctggggtcggaaccagttacagatcgttcaagtt

SEQ ID NO: 372 - DNA, 813 bp, Propionibacterium acnes
cgattttgtccacccacccctgtcgattttgtccgccaagtattagacaaaccattagacagtgaattagaccctgggtcgcgtcagcgtgttagctcaccaacgcgcgcgcgcgcggcggccgagccgccgaagccaaagaaacccataccaccaacgcctgaaccagcagcccccgcttcagacagtcctgtgtcagcgcacgctgatgaggctgccgagttggcgtggcagttcgtggggtggtgtcctcagctggtaggggcaccgaagaaggtgcgtggccagctccgtcagctggtcgctgccgagatccgccggaatccgggctggctggatgcgccagcgttggaggttgttgcccagcgggtacgtgctgaaggtgcgctgggggtccagcactgcgagattgtgcgagccgagctgcacggggtgatcgccgaccagaaggccgcccccgcccgccccgacgccctgcacgcgcgggagcccaagtggtgggacgacgtgtactacgaaggaaacacaaccgtgtggacgtacgactctgacgaaaccagtgacgacgacgaggcgtggaaccggtcgcaggtatgtcatgttgctgagcgtgacgacatggctggcgggattgctaccaacctgctggcctcccacgctgatgatccgatggcctggctgactcgccgtcaaaccatgctgatggctcgtttcccccacgcccagaacgaggtcaccgcgatgtgccaaatcgtgcgcaccgccctggaggccgacctggccgccggaacccggtgggaggaccgatgaggg

SEQ ID NO: 373 - DNA, 1204 bp, Propionibacterium acnes
ccggagtatctggacaaggccgtgctcactgcgttgtatcccgatgggttgcccttcgacgaggacaccgaggagccgggcgagaatgccgggcaggaggagcttgcgatgactggatgagcccgaacatggttgaaggccgccccgccaggcgaccttcaatcaatggtttcggttgtcagctgcagccacccttgccaggtgctgtggttcttctccagaggaggagggaccgccatgaagacccagaagatctagaagatccaaaagaaccggtttcggctgttgcttcggtcttcatggtagctgatagcccgcgtcgttggaagtgcgacgacgccgatcctcatcggtatcgcaccctgttccagggtcgagaatgtgaaggattaacaaccatgacaagtcatgagacgccctccctgagggcgtcatgaccgctttaattcaagctctgccgacagctgaactgtctgctggacctggtgctagcagtccagctagaccctctgctgagggcttcatcaagattcatcacgaccttattagtgcgggcgtgtcgggtaacgcgatggcgttgttcgtcgcgttacgtaaccagcccggctgtgatcagtggacccgtcactcgtacctgcggctagcccaatggtgcggctgggatgggctgtcggaggcggcgggctgtaagcgggtgcagcgggccgctgctgagctcgctagcggtggttggctggaatcgcgggtcggccatgatcgtcgcaccgctaagacgctggtgtggcatcggttgaccagccccgacaccgaccgctgggagcaattgccgcggattgtgtgggcgaggatctgccagatcgccggggagacgtcgggagagtgggggaggcattggctggtgtggcggatgctggccggtcgtactggtgtggctcaggcccctatgtccatcgtggctcggttcctgggctgttcttcgcgccaggtctctcatatccgtggggctctcgttgatgccggtctgctcggctgtgacgaggtctcgggggcggcgagccgggtgtggttcccctcgatggccgaggagtgtgcagcggatcgtgaggtggttgatggggccgtcgtcgatgctggggtgggctctggtgaaggtgtcgaggagggcggggaacccctgtcgattttgtccacccacccctgtcga

SEQ ID NO: 374 - DNA, 1288 bp, Propionibacterium acnes
ccgaactcaccgaagaccaccgcaaccgcctcgccagcctcgtcgaggctcttccccgcgtgtcagtcgccgcggtaacaaccagccccaccagcccagacgaatggtccctcaccctgacaggtgacccactagccgccgacgtggctcccctcggctggcacatccacccccaaaccctctcccccgacctgtacaaccgcatggttgaactactcgccaactccgccgccgcagactacgaacccgccagctggtggaaccacgacgccaacgacgagcccaccaccgaccccaccaacgaggaagaatctaccccgagcaggcgagcccgcccgaatatccgcctgaccaccctgaccggcggcatcgacctatccagcgtcgacatcgacgacatcatcgacgaagccaaccaggccctcgacaacaccgaccaggccaccaaccaggttcgtgtcgacaccgaccaacccggcaccgacacccccttccccatcgacgacatcgacccgctgagctccgaccatccggtcctatccatcatcggccaccccgacatcacaggtgccactggaaccgttgggcgctccccgtggcgctgccaacagttggccctctacatcgctgagcatccgggagcatcgggggcgactatcgccgatgatttggggctatcagcgtcgacggtgcgctcgattgctacacacctgcgacactggttgggagccgatgatgccggggtggcttacatgccggcggcgacgcgcggctaccggctcgatgagcggatcgtcacagatgtggacctgatcgacgctgctgtggccggggcaggcattaacaccgctgagacggccacactggtggccattttgaagctgggccgcggacgggtcttcgctggggttcctgactcggaacttcgccagttcagggcgtcgatgtaccacgtggaggcccgcatcgtcgatgctgccctccaagtgacagaccgggccctggaagccggggacctggggctggcccggtgggcgttgacccaagggctactggtgtctcccgatcatgaggacctggtcgccggttgtctgcgcaccgagtaccaggccggcaacatggacaaggtcgccgagctggtcgatcacctgtcggctaccgcacgccgactgggcgtcgacctcaacgaggacaccacccggatcatcgatacggtcacccacaccgacaggagagcgtcatgatctcccctgcactcatctccgtcaggaaggttcctatgcaccat

SEQ ID NO: 375 - DNA, 1239 bp, Propionibacterium acnes
aaaagaagaaacccaccaaccacgaaccatccgcaatatcgccggcgtaatccgacaacccctcatcacagtcaccaaggtcgtcgcgagcatccgagacgtcatcgtaagggccacccttgagcacctcgatgtacttgtcgtggcacttcgcatcaataatccggccatagttgagctgctgatgaaccggcgccacgaacgagtccacaatgatcgccgacagcttcggatccttcgagtctcccgtcgaggtcatgtcatcaggaatctcgacctcaccagcggtcgccgtcgcaggatcaaccgaactagtaatcatccgagacagcgccacaccgaactgctgggtgcgagccaacggagtagccaacgtcgtcgtatcgcctgcgaacttcgccaccggggccgccaagaaacccaacgccagcgccgcagcaatcgccgcacgcgcacccgtagcccacgccccagccgtacgtcccctcatcatcttgacgaccacgcccacaccggcgcacgtcgtcagcaacgtcaacaccgttccaccccagctgtccgctcccagcggggccaaaaccttgtcgtggatatcgttctgcaaccccaccagcgggccggtaatccacccgacccagctcatcgccacggtccagtccaacaaccggcacagcaacgcaatgaccatcaggtacgtgttccaacacataccaataatggaggcccacatagccttcaacggggccgtaacgccaccatcgtccatcgacatctggtactgaaacaagtgaataccgttggagtcagtcacattgaaaccgtcacccatccagcccagccccgggcccgacgccatagcaggcacactgctcagcgccaccaccaaaaccagcgtggtgacgatgatacggaaccaccgctccccggccccggggcggcgtggatgacggctcacgctgtctcccggtcgtgctcgggcgggttggagctggcggcttcgcggtggggagcgtaggcaggtctcagtagtcgaatttcaccgacgttgccgtgctgatcggcgtacaggccacaaccggggcctccggggttgagggcaatcttgaccaggtcagcgaactcttcaggggacgttttagggtccacgcccaggaactcgacacctttctgggcgaggttgatgttgtcgcacagcaacacgatgcgatgctgaatgaggttgcggacggtctcgttggg

SEQ ID NO: 376 - DNA, 1232 bp, Propionibacterium acnes
  misc_feature (28)..(28): n is a, c, g, or t
gcatcgatatatctatgtatctgtctgnggttttttagagggcccactcccgtcgccccgggccgctcagcgataccgcaaggctgtgtgggatcagctgtgccgctctcccgacatggcagacagcaccctgcggactgactgacactgtggcgccgcggaggtctcccgcggcgtccgctggggcgagtgcgtgtctgtcatctcatcttttatcgtcatgtttccccttgtcagaggggtctttgcaaagtgacaacgtcaggggtcttgacgacaacatcctcgacaacatcgtggcggtggtctgtgtcttgtcagttcaacgcaccggggaaagaggcaccgctgatgttcaccaccacaaacaccctcaacgatgaatgggaccagattcgcgccatcgagatcgattggcatgactgccctgaactgatgcactgcatcgacgttgatgatgtgttggccgtcattcctgccgcccccgacgccatcttgggctacctcattgcccgggctcagggcggtgacgagttggccacccgcactatcatccaagcgttcacaggcaagcttattttgatggccacggccaccaaggtgcgccgtactaatgacggcttcaatgatctgttggcgggtctgtgggagacgatcatcacttacccgttggatcgtcgccctgacaagatcgctgcgaacctcatcctcgacacgttgcaccgggttacccggttttggcgtgctgattcccccgatgaggaagaggctcacggtctggtgcccttccctgacactctcatcgccccagagcccgatgaggacgtcacagctagccaggccatcgccttggcggtggaccgcaactggattaccgaggacctagcccgcctcatgagccatatttactgtgacggtatgactggagctgatgcgggtcgtctgcatggctgcgctccagctacggtgcggtctcgatgccgtgatggtcgggccgtgttgcagcgcaacgccgagacgatcctggccgtctgctgatccctctcttgctcatgcctgccgccaccctacccctacctgctagaaacatagccatgtctccagcaacgcatctagcatatcttctagcaatttatctagctatgtatatagctgatgatctagctatcatatagctgtgtctccagcccaaaatgacagcccaatggcatgcttgccacaggaaggtgcgt

SEQ ID NO: 377 - DNA, 1200 bp, Propionibacterium acnes
ccggagtatctggacaaggccgtgctcactgcgttgtatcccgatgggttgcccttcgacgaggacaccgaggagccgggcgagaatgccgggcaggaggagcttgcgatgactggatgagcccgaacatggttgaaggccgccccgccaggcgaccttcaatcaatggtttcggttgtcagctgcagccacccttgccaggtgctgtggttcttctccagaggaggagggaccgccatgaagacccagaagatctagaagatccaaaagaaccggtttcggctgttgcttcggtcttcatggtagctgatagcccgcgtcgttggaagtgcgacgacgccgatcctcatcggtatcgcaccctgaaacagggtgttgaacatgaaggattaacaaccatgacaagtcatgaggcgtcctcccggagggcgtcatgaccgctttaattcaagctctgccgacagctgaactgtctgctggacctggtgctagcagtccagctagaccctctgctgagggcttcatcaagattcatcacgaccttattagtgcgggcgtgtcggggaacgcgatggcgttgttcgtcgcgttacgtaaccagcccggctgtgatcagtggacccgtcactcgtacctgcggctagcccaatggtgcggctgggatgggctgtcggaggcggcgggctgtaagcgggtgcagcgggccgctgctgagctcgctagcggtggttggctggaatcgcgggtcggccatgatcgtcgcaccgctaagacgctggtgtggcatcggttgaccagccccgacaccgaccgctgggagcaattgccgcggattgtgtgggcgaggatctgccagatcgccggggagacgtcgggagagtgggtgaggcattggctggtgtggcggatgctggccggtcgtactggtgtggctcaggcccctacgtccatcgtggcccggttcctgggctgttcttcgcgccaggtctctcatatccgtggggctctcgttgatgccggtctgctcggctgtgacgaggtgtcgggggcggcgagccgggtgtggttcccctcgatggccgaggagtgtgcagcggatcgtgaggtggtcgatggggccgtcgtcggtgctggggtgggctctggtgaaggtgtcgaggagggcggggaacccctgtcgattttgtccacccacccctg

SEQ ID NO: 378 - DNA, 1271 bp, Propionibacterium acnes
gttgagggcgtgggatcagggtgaaggcagccaaactggccgggatgaggatgacggccgcgccgacacttcggagcgaggtcatgtgacgatccttcggtagctcgacgggttgccgtagatcttttccacgttgatgccactatgtgggttgtcggcgctaaccatttggcctccaccgatgtagacggccacgtggtgggcagggcttccccagaggatgaggtcgccgactttgagctggtcacgggccacggcagtgccgactttctgctggtcggcggcggtgcggggaaggctaatgccgatacgccggtacagcgccgaggtcaggcctgagcagtcgtagccgccatcggctttgccgttgccaccccacacgtaggcgtaggagttgttgtcggcgatcgatttggcccatgccacggcttcggccaggttcttcgacacaccggtctcgttagcggccccggtggcacagttgtttgacaggttccctgtagtagtggatcccactatttgtttggccatggtttcccatttggcgtaggcatcgggcagggctgagccttgcactgcctgagctgcctgcgtcagcggcatcttctgccagtcagcgatgtcgactaaaccgggaatgtggaatccagggccgccggccgatccggggccagcgtaggtgatggtgtggcctttcaagaacgcttcggtggcgtaggcatcattgttgatctgatccagagtcccgtaccagcccggcaggatgcgctgctgaaaggggccagcgtcgccgtcaccgttaggtttcgtggaggtggggtcggctccgagatctgattcttgtttggcggtcatgatagcgatgaccgctgcctgggtaggcagtttgtcacgctggaccacagtgacgatggtggtcacgagctgcttctgtctggcggtgaggcctccggcgccgaccccgccgccggtgacagttcccatgcaggcatccccgccagcgcctccaccagagttatcgtcgagggccccagagcctactgacagcagcggcacaatgatcacggtcgctggcaagaccgccaggcccgccagcatcagaactgctgcactcaccacggcgatcacgtgagatgctttcaacgctgcccacctctcgctggtttgagggggcgacgcctgctggtacgcacaggcttggttgatccagtccgccgttgattggcaggcctgggtttgatcggcttgctgggacccggtttgggctccgg

SEQ ID NO: 379 - DNA, 1100 bp, Propionibacterium acnes
aggcgagccagacgggcaataagcgcgtagagggctcggccaaacaccttgtgcgggggcagctgccgaaacaaatgttctgacagcatctcctcggcgttaggaagagcgatgccacaagtgccaatgatgaggatgtcggcactcaggtcggcgggaggaaggtccgggtcaaagatggccgaagctagggaggccgagttctcgatgtcagcgaacacggcaatcctgtcagcgatcgcggtggcctcgggaaggtcgcactcctcggccaggtggcgggccaaacgcccacacgaggtgatctggtggtcacgcatgtaggccggtttgaggaccttggccagcgtggtcccggccacaccgatggtctccaagttaagcaaggtcagcaagaacgactgggcgacctgcccggccatctccgggggaaggatgcgcagcgggtccagcgacagcttggggtgggccgtgtcgacgatctggcgtctaaccccgtcgatagagttgacaaaggttacccactcccgctcatcggagttgtcggtggcaataatgcgcccgccccgggccgcgatggctgcgcacagccgcttctcggccatcgtcttgcccgcgcccatcttgccgatgaacgccaccgtgttgcctttctgatcctgagtgtcggcatgcaaatcgaggtaggccagcgactgcaacggggagcctgtgaccacagccaacgggatgccggtggtacggcccaaccggtactcaaccaccgggatagatgcggcgaacgcggaggcgtgagtcagctgacggtaggcgttaagcgaggaggagaaccggccaccgggccgggcagcccacagcaagtcctcctgacggcccacgggacgcacccacgtgaagtcaccgaacaccggatcattgacgaacgctcctgccagctcctcggtggtctcaaagtcaggagacgagacagtgacggtgataagagcctggatctcgacctcacgctcatcggcggccagctcggcgttgtagtcgacgagcacctgagcggaatgctcgatagacatgagggtcgaagcctgggtcatctcaccgccctc

SEQ ID NO: 380 - DNA, 1109 bp, Propionibacterium acnes
cccctaggtcctgatgtgggtcgaggtccttggaatgatggaagttcctacacacccatcgccaaagacctcaacatggacaacgctaccttcaccactccctcatctgtgaagagccagtttatgcacggtgttgaaagaggcgtcggtctacgacgaatgcgggttaatggtcttgcggtgtggggcgctgggcgatggcatcgagaacgcgtgagtgggtggcgatccattcggccgcgtcggggttgatgttgcgggcgacggtgtcgatcgctgttacgtagtgggcaagcctgcgaatctcagcttgttggtcagggtgatcgctgatgagaggctcttgatgggaggcgcggttacggacgtggcggatgagctccacgttttcctcgaagtcgcgtcggctacgccccgggtagtgaggcatacctccgttacgtaagtcagtgagagctttccatacggttgcttccaggcgcggggtgagcagaaagcgccagttgtccagtgacagactcgccacgatctgatcaggggtcgcatcgagcctcgcgcgccgcagtcgcttctcggccctggcgacgttacgcgggaaaccaccgagccgatagctcggggattcccaccaacgccgtatgccagtatcggcgctcaggcgcacgtcaatgaagtttctcaggagtacctcgacatggctgatgtcttccaagaacgctttcgagatgcgggtgttccacacgtaccacgcatcgactggttcgatccggtagcggctgagcctggcgggtgagaaccactcctgcaacgtctcacgactcaccgtgggagcgtggtaggattgatgacgataggcctcgggaaggtcaatgccgcgaaatatcggtatacccccgaggtcattgttttgcccaggcccctcctcgcatacttgcggggcgtcattggctgccgtcatctcgtctcttcccggtacgtggctgtccatgttcacgggcaggtacggcaatgaggttcccgcacacaaacctctaccaagcatacgctggcaagccccgacgagacgacgcctccgcccgccacaccaacggtcaccgccccggccacgg

SEQ ID NO: 381 - DNA, 1033 bp, Propionibacterium acnes
ccacggtgacctgccacaggctcggatcagacggggagacggtagcgtcataggcggtgacggtggtgggcgctggaccaggtttgcggggcatgcgcgcatcggtgatcttggccgccaccaggtgttccagattgtccaagtgcccggagtcagaggtcagcagaagagtagtcacctcgaccgcggtggctgaggcgatctgagctgtgcggcggtcgtgatgggtggtgtcagtgctgacagctgtggtgggagcggatgccggggccgccgaacggaccagggcaacggggccgcatgcgactccgcacagcacgagggcaaggaagcctttggtggccatcgatccggtgtggggccagggacccacgttttcctgtgcctgttttttcttggccgaccaacggcgggacttagggttagcggatgcaccttctggggtgcatgctcgtctcaatcgcatcggtcacctccttcactggatgaagggaccaaggaggtgaccgatgtgcggtcgaacccgaaaaagttcaaacttttttctgggtctgcctcaagtacgacagaaggcctgcatcatcacggcgttgtggtagcagatcttgcgtcagcgcaaatgtatgggcctcgtaggagtagctcttaggtgggtcccggtggttgcggccagggcgagggtgtcgggtatgtgtagcgctagtcccgggttcgtggtgtgagggcttttgggtgctgacatgcactacccattgctagacgctgtgctgtggcatggctggacgtctagcagacgggttgacatcacctttaggctggcagcgcccgaggccgcaggccagaggaagcggacagcctaacgattgacgtccccctctcctttccccaacctcctggagtcgatgacccggagatagatcgatgtctatgcatctgtgcatcgatatacctatgtatctgtctgtggtttttagaggccactcccgtcgccccgggccgctcagcgataccgcaaggctgtgtgggatcagct

SEQ ID NO: 382 - DNA, 1171 bp, Propionibacterium acnes
ccagcccgacagccatgccagaggtgaccaggtccagtcgatgcgaccaacaacgaactgggcgagccatccggcagccagcgcgaaaatgaaaccgcggatggtcatgcccccgtcgataattttgaagcccatcatcgcggcaggaactacgccgccgacagcgagcacctgatagatcgtgtagggcccgccaggaatccttcgacctgaggagtccttgccgataatgcggggctgctggcgggcctcggtgtgccactgaatatccacgatcagctcttgcccaatccttgcatcatctgtccgaagaattggatcgcgttaccttcgataagccagtgcgccataccacacacaaacagcatggagacgatcttggccaggctcataccgtgtttgaagatgttgaacgcggcaatgcccacgactacgaccatggcgacggctcgcaccgcggactgaccttcacctgccttgatcgtcgtccattcgaagaggttctgcgattccagtggcagcaggaggaattgatcgagcatgagaggttttcctttcaggaagccgaccgggatggtcccggtactgacgggctggacggcacgggtgtgccggccaggggcagaaggcgtgacggctggtcgagggaggcaacctcccagcggcctgcacggctgacaagagtcaggccgtactggctgggccgggtagtggattcgtcaccggttagctggcatgtcacggtcaccgtgacggtaatcttctgccggtctgagggggtggggacctcgtcaggtcccaccacatgagtggttttcactgatacgcatggggctgggtcaaccgcggtgaaagcggtccccgggctactccatctcgacaggtcgtcgctgccactcagcatcgcggccaagaaacccgaagaggtctgggcagccgggtcagcaggacgaatctccgaggagtccacgtcgggggctgaggccggtgcaggcatggggatctgcccaggtagacgcaaggcgatggccttgccgttggaatcgacgtggaccgggactgaccaggcctgtccgctcccggattggccgcccatggtgaccacggtgacctgccacaggctcggatcagacggggagacggtagcgtcataggcggtgacgggggtggg

SEQ ID NO: 383 - DNA, 1042 bp, Propionibacterium acnes
attatcggcgcgacaaccttactgatgacgctgttggttacgccgtagagcacatcttgtactcgtgggcgctcgacgatgctgatgatcctcgttgctggatgatgattcgtgttgacccagctggcctcctcatggagctagttatcctcatctacgacgatggctatgaactcctgatccacgccatgaaagcccgccctcagtatctgagctacttcgctatctagtgttgttgggcgagttgaactcaacttttctccgacgcaagcgccaataaaaggctgatccatccgaataccaccaaacacggctgaagtgtggaacagattcagcaagacagggtgcggtgctcgggtgcgttggggagatgaggatattcaggcttctggcgggatgtggcttgatgacgtccaggatcaccggttcggttttgaaggtgccttgcattaatgtcgacagggtcgtacgactcgaggattggatcgaccagcccgttgcgtctgaagaacttcatccaccccggtggagctccggccgcgtactggtgcaacggatcattagcatgggtagcgtgagtatgccttcgatcgtggtcagtgctgtcatcatccaagattctgacgggcggcttctcactgtccgtaaacgaggcaccgaggcattcatgctgccaggcggcaagccggagcccggcgaggactcgcgtcaggcagtagtccgggaagtgcacgaagagctcggcgtcgcattgtcttccgacgacctgcgtcgggtgggagtgttcaccacgcgagcagcgaatgaggccggccatcaggtggtggcgacgattttcacccacaccccggttgcggtgagtgagccagctgctgagatcgagcagattcgttggctcgattggagtgtcgacgccctgcctgacgacctggccccgctgctggtcgaggcagtcatcccgtggctgcggcgccgtatccggtcggtcgctgtattcacgggtgcgaaggatggaaccgaccctcattatcgtgtcgaagca

SEQ ID NO: 384 - DNA, 1057 bp, Propionibacterium acnes
cccctaggtcctgatgtgggtcgaggtccttggaatgatggaagttcctacacacccatcgccaaagacctcaacatggacaacgctaccttcaccactccctcatctgtgaagagccagtttatgcacggtgttgaaagaggcgtcggtctacgacgaatgcgggttaatggtcttgcggtgtggggcgctgggcgatggcatcgagaacgcgtgagtgggtggcgatccattcggccgcgtcggggttgatgttgcgggcgacggtgtcgatcgctgttacgtagtgggcaagcctgcgaatctcagcttgttggtcagggtgagcgctgatgagaggctcttgatgggaggcgcggttacggacgtggcggatgagctccacgttttcctcgaagtcgcgtcggctacgccccgggtagtgaggcatacctccgttacgtaagtcagtgagagctttccatacggttgcttccaggcgcggggtgagcagaaagcgccagttgtccagtgacagactcgccacgatctgatcaggggtcgcatcgagcctcgcgcgccgcagtcgcttctcggccctggcgacgttacgcgggaaaccaccgagccgatagctcggggattcccaccaacgccgtatgccagtatcggcgctcaggcgcacgtcaatgaagtttctcaggagtacctcgacatggctgatgtcttccaagaacgctttcgagatgcgggtgttccacacgtaccacgcatcgactggttcgatccggtagcgtctgagcctggcgggtgagaaccactcctgcaacgtctcacgactcaccgtgggagcgtggtaggattgatgacgataggcctcgggaaggtcaatgccgcgaaatatcggtatacccccgaggtcattgttttgcccaggcccctcctcgcatacttgcggggcgtcattggctgccgtcatctcgtctcttcccggtacgtggctgtccatgttcacgggcaggtacggcaatgaggttcccgcacacaaacctctaccaagcatacgctggcaagcccc

SEQ ID NO: 385 - DNA, 1057 bp, Propionibacterium acnes
cccctaggtcctgatgtgggtcgaggtccttggaatgatggaagttcctacacacccatcgccaaagacctcaacatggacaacgctaccttcaccactccctcatccgtgaagagccagtttatgcacggtgttgaaagaggcgtcggtctacgacgaatgcgggttaatggtcttgcggtgtggggcgctgggcgatggcatcgagaacgcgtgagtgggtggcgatccattcggccgcgtcggggttgatgttgcgggcgacggtgtcgatcgctgttacgtagtgggcaagcctgcgaatctcagcttgttggtcagggtgatcgctgatgagaggctcttgatgggaggcgcggttacggacgtggcggatgagctccacgttttcctcgaagtcgcgtcggctacgccccgggtagtgaggcatacctccgttacgtaagtcagtgagagctttccatacggttgcttccaggcgcggggtgagcagaaagcgccagttgtccagtgacagactcgccacgatctgatcaggggtcgcatcgagcctcgcgcgccgcagtcgcttctcggccctggcgacgttacgcgggaaaccaccgagccgatagctcggggattcccaccaacgccgtatgccagtatcggcgctcaggcgcacgtcaatgaagtttctcaggagtacctcgacatggctgatgtcttccaagaacgctttcgagatgcgggtgttccacacgtaccacgcatcgactggttcgatccggtagcggctgagcctggcgggtgagaaccactcctgcaacgtctcacgactcaccgtgggagcgtggtaggattgatgacgataggcctcgggaaggtcaatgccgcgaaatatcggtatacccccgaggccattgttttgcccaggcccctcctcgcatacttgcggggcgtcattggctgccgtcatctcgtctcttcccggtacgtggctgtccatgttcacgggcaggtacggcaatgaggttcccgcacacaaacctctaccaagcatacgctggcaagcccc

SEQ ID NO: 386 - DNA, 1052 bp, Propionibacterium acnes
cggggcggccgtagcagtccaagcggcccgccaggcactatctgctgccggggtggacgggtcggtgcaggaggacgggtcgaccatcacggtgaccacgtctcaaagtcggccgacagtgttcctgtcagcgatcggaatcagccaggtaagggggcatgggcaggcccatgctcagcttgtgggaccgggagaacgcccatgacagtgatacgtcgtatcggtgccctggtggcactgcttgtggtgatagccggcttaccggccgggctcgtggccgcaggcgccccgctagtaccctcgggcctgtcatgggcccatgtgcggcatctgttggttaccccagacatgaccgggtctgtgctggtgtggctggtcagcctcatcggctggatcgggtgggcatggttcgccctggccgtcgcagccgaagcggtgacgatgctctcagggcagcggctgcactggcacatgcccggccctcgcctagtgcgccgagtggcagccggtcttctcattgccgcgttcgcggccgcaccggcagccacaagcacggctcacgccgccgaggccacccatgtggcggtcgccgcccaggctggaccggcacacgcggcccccgcccaggacagccccgccaccacctctcaggccccggacgcctccaccactccgaaaatctggaagacctacacggtgcgggccaacgactacctgtggaagatcgccgagcactactacggtgacggcgcccaattccgtcgtatcgccgaagcctccggtatcgacccgcactcagagctgaaagtcggccagaaactggtgctaccggttcccgagaacacggccgcagttcattcggttaaagcgggggagtatctgtgggagatcgccgagcactactacggtgacggtgcccagtaccataaaatcgctgaagcttccggtatcgatgcccattccgatctagccgtgggccaaaaactcgtcatccccgggcccctccgccacgacgccacgccgccacaccactcggcgtcgacccacgcgaa

SEQ ID NO: 387 - DNA, 1057 bp, Propionibacterium acnes
cccctaggtcctgatgtgggtcgaggtccttggaatgatggaagttcctacacacccatcgccaaagacctcaacatggacaacgctaccttcaccactccctcatccgtgaagagccagtttatgcacggtgttgaaagaggcgtcggtctacgacgaatgcgggttaatggtcttgcggtgtggggcgctgggcgatggcatcgagaacgcgtgagtgggtggcgatccattcggccgcgtcggggttgatgttgcgggcgacggtgtcgatcgctgttacgtagtgggcaagcctgcgaatctcagcttgttggtcagggtgatcgctgatgagaggctcttgatgggaggcgcggttacggacgtggcggatgagctccacgttttcctcgaagtcgcgtcggctacgccccgggtagtgaggcatacctccgttacgtaagtcagtgagagctttccatacggttgcttccaggcgcggggtgagcagaaagcgccagttgtccagtgacagactcgccacgatctgatcaggggtcgcatcgagcctcgcgcgccgcagtcgcttctcggccctggcgacgttacgcgggaaaccaccgagccgatagctcggggattcccaccaacgccgtatgccagtatcggcgctcaggcgcacgtcaatgaagtttctcaggagtacctcgacatggctgatgtcttccaagaacgctttcgagatgcgggtgttccacacgtaccacgcatcgactggttcgatccggtagcggctgagcctggcgggtgagaaccactcctgcaacgtctcacgactcaccgtgggagcgtggtaggattgatgacgataggcctcgggaaggtcaatgccgcgaaatatcggtatacccccgaggccattgtcttgcccaggcccctcctcgcatacttgcggggcgtcattggctgccgtcatctcgtctcttcccggtacgtggctgtccatgttcacgggcaggtacggcaatgaggttcccgcacacaaacctctaccaagcatacgctggcaagcccc

SEQ ID NO: 388 - DNA, 1057 bp, Propionibacterium acnes; identical to SEQ ID NO: 387

SEQ ID NO: 389 - DNA, 1057 bp, Propionibacterium acnes; identical to SEQ ID NO: 387

SEQ ID NO: 390 - DNA, 1057 bp, Propionibacterium acnes; identical to SEQ ID NO: 387

SEQ ID NO: 391 - DNA, 1055 bp, Propionibacterium acnes; identical to SEQ ID NO: 149

SEQ ID NO: 392 - DNA, 1055 bp, Propionibacterium acnes; identical to SEQ ID NO: 149

SEQ ID NO: 393 - DNA, 1057 bp, Propionibacterium acnes
cccctaggtcctgatgtgggtcgaggtccttggaatgatggaagttcctacacacccatcgccaaagacctcaacatggacaacgctaccttcaccactccctcatctgtgaagagccagtttatgcacggtgttgaaagaggcgtcggtctacgacgaatgcgggttaatggtcttgcggtgtggggcgctgggcgatggcatcgagaacgcgtgagtgggtggcgatccattcggccgcgtcggggttgatgttgcgggcgacggtgtcgatcgctgttacgtagtgggcaagcctgcgaatctcagcttgttggtcagggtgagcgctgatgaggggctcttgatgggaggcgcggttacggacgtggcggatgagctccacgttttcctcgaagtcgcgtcggctacgccccgggtagtgaggcatacctccgttacgtaagtcagtgagagctttccatacggttgcttccaggcgcggggtgagcagaaagcgccagttgtccagtgacagactcgccacgatctgatcaggggtcgcatcgagcctcgcgcgccgcagtcgcttctcggccctgtcgacgttacgcgggaaaccaccgagccgatagctcggggattcccaccaacgccgtatgccagtatcggcgctcaggcgcacgtcaatgaagtttctcaggagtacctcgacatggctgatgtcttccaagaacgctttcgagatgcgggtgttccacacgtaccacgcatcgactggttcgatccggtagcggctgagcctggcgggtgagaaccactcctgcaacgtctcacgactcaccgtgggagcgtggtaggattgatgacgataggcctcgggaaggtcaatgccgcgaaatatcggtatacccccgaggccattgttttgcccaggcccctcctcgcatacttgcggggcgtcattggctgccgtcatctcgtctcttcccggtacgtggctgtccatgttcacgggcaggtacggcaatgaggttcccgcacacaaacctctaccaagcatacgctggcaagcccc

SEQ ID NO: 394 - DNA, 1057 bp, Propionibacterium acnes; identical to SEQ ID NO: 393

SEQ ID NO: 395 - DNA, 1057 bp, Propionibacterium acnes; identical to SEQ ID NO: 155

SEQ ID NO: 396 - DNA, 1057 bp, Propionibacterium acnes; identical to SEQ ID NO: 393

SEQ ID NO: 397 - DNA, 1055 bp, Propionibacterium acnes; identical to SEQ ID NO: 151

SEQ ID NO: 398 - DNA, 1003 bp, Propionibacterium acnes
ccagtcctggatcgggtgccggccgaagtcgcgtacgatagccgagtaaccaagttcgccccagcagaactggcgcatcccctctatgtcgcgccagacgtagaagggcgcgtaggagttctggggtgcgcctttgaccttttcttggatgaggtaggccttgaactccagtccatggtagccgtccatgaggtgtccagtctggatgacgcggtcgcggatgatctgcatgtcatagtcggtgggcagggtgatctgatattgcatggcgtacatcagcggttctccttggtttcgtgggagtaggtcgtgggggtgacgggttcctgccaatcgatggttgacaagtcgttggcggcttgttggtaggtaaggtggatcattggctgtttgagtgcagcgccatgccagtgtctctggccggcgtcgatccagatggattcgcccttggtcaggtgctggggtgcttgtccttcaatatggaccagggcaacgccgcccgtgacgtagaggccctgtcccttggggtgtgtgcctcagcggcaaacgtgacggcgtgggcggcacgcccggcgtcttccgtggcacgatcggccggatccatggcggcgcgcagctgctgttctgcagccaggcgtccaggtcacggcgggcagcatcgacacccagggcagcctcgacggcttcagggctacgacgctggccgggctggttgaccgcagaccactggtgccgggcgtcgtccagatcatggccggcggcgtcgatgagggcggtggtggcttcggcgcagcatcgcctgatccactccgaacgtgacaggccagctgtctcggcggcactgtcaatgcgcgccaggagagatttcatgggcgctcatctgtagcctccagataggcgttgatgtagcgcagagcctgatccgtcatgtcgatggcggctgcctcggcagacgacacaacgggctgtggatgataagaccacccaacatagacggcgaaca

SEQ ID NO: 399 - DNA, 1017 bp, Propionibacterium acnes
ctgggacccggtttgggctccggagtcttaggctccggcttcacatgcctaggcacttcggctgcggtgggaggagtcagcacgtggcgtaccggcttggtgaccttctgggcacccgaaacaaccggcttagacaccaccttggcacctttgaccaccggtgcggctgccttcgcgccggccttcttgactgcacgatgcgctttgatagccccggcctcggcccggccaaccctactagcagtagcatcgagggctctgtggcccgtcgttgccctcaccggtgcatccttgccctggcgggtctgcttcgcgatcgccgacatgccgcctcgcaatgccgaaacatgattgtgggcgtgggcgatcgccgacatgccggccgtcgcgatttttgactggccctgcggggcccctgccccagcacgaatctgccggtaagccgccgacgtgccacgagcacccgccgccattcgcgccaccttcgcagccctagtcactcccgtcgacacgccacccgtggctaccgcagcagcacccgagaccacagtcgaggccatccgccttcgacccgatccggtgagcttgcgaccaccactgcgcaccatccggcgagcaccccgcccagcccactggccgatcaccgagcccctttcggaacgcttgctgcgcatccaatcgttgatcttgtccctcagccccttctcgcccttgtgacgacgccacatggacatcaagaacccgataatccccacgagctcgagcatgttgacaaccatgaccttgatggcgacatcaccgtcagaggcgaaaaccgacttgatgatgagcatgaccacacccaacatcaccatcgacccgacaatgccgatcatcgagtacaagatcgaacacagatcccggatgagcggatctgtgcggccagggatagcccgcaacacgttgagcatcgacataaacgccgaccacaccaacttgcacacgtagaaccagcacatgcccgcgaacaccagcagg

SEQ ID NO: 400 - DNA, 1108 bp, Propionibacterium acnes
ccccaatgcccccacaacgatcagcacaccaacagcgatcatcaggtgggcagcactaactgatcccaacgaaccaagatcaaacaagccctgcccgggagcgtcgagcagtccgtgggcgcgaagccatgctccgagattgccaatgatcttggggaccatcttgttcagtagggctatccctccgatgccgacaacgaggaagacgaggatttcttcgcctgcgttgtttcttcctgtgtttgcggtcatgctgccttctcggggtggatggccagccagctgatgaggttgtcggtgatctgccctgagatttggatcagttcgacttgcccggcctgccatgcccgcgatgtgccggcaagcaatgatgctgggacccctactgcgcggccacgggatgcaacctcagccaaggcggcgcgtaactcctcgacggtgctttcgatgtaccaactgccgtcagtactagtctcagcggcatcggtggtagcgataagagcatcggtgaggtcgtcgacggcgcggtccagatcagcgatgtccggtagggctacagcagtcatggtgtgtcttccttctagggtgccttcactggtgaagggtccctagccccggccgatgtgcggtgctgtgggaaaaatgcttcccattggtccgtcttagttaggaaacttggcctaagtgctgtcgagagtcgcgtgttcgtgaccggttcgaagacactgccgctttgccttcttgcccgtggcgcttccgagatgggttcagtgggcgatggctaggccgatgagggcgccgctgcacaggctgggtgcccaggggaggaatcgggtggtgtggtgtcggaaccggtcgatgagggcatatagggcgatcagggtgaggccggctatgaccgtggcgtggatcgtgtcgatgccggttgctgcggccggggctgcccacagtggtgtgatgcgcacgtcggagaagccgaagccgcctcgggagatgagccaggcgatcatccacgctgcgaagatgatggtggtagcgatgacagcacgtgttgccgcagtctggtccgagagggcggtaacggctacagccccgatccatccggccc

SEQ ID NO: 401 - DNA, 1004 bp, Propionibacterium acnes
tgggttcagatttcgaatgtgggaggggtttgtggatgggtatcggtgtcctcggcgagggcttggtcgagcaggcaggtggccggggtgtcggtagtctcgtccagctcgtcgatcatctcgtcgaggaagttgggggtggtggatgcggcccacacaggtgggatagccggtgcgggtcgaggcggtgtggggaggcggagtttggtttggccccagaggggtgtgtgggtcatgccggcgggagtggtggcggcgtgagtggtcacacgccaccagcccgccagccatgccagaggtgaccaggtccagtcgatgcgaccaacaacgaactgggcgagccatccggcagccagcgcgaaaatgaaaccgcggatggtcatgcccccgtcgataattttgaagcccatcatcgcggcaggaactacgccgccgacagcgagcacctgatagatcgtgtagggcccgccaggaatccttcgacctgaggaatccttaccgataatgcggggctgctggcgggcctcggtgtgccactgaatatccacgatcagctcttgcccaatccttgcatcatctgtccgaagaattggatcgcgttaccttcgataagccagtgcgccataccacacacaaacagcatggagacgatcttggccaggctcataccgtgtttgaagatgttgaacgcggcaatgcccacgactacgaccatggcgacggctcgcaccgcggactgaccttcacctgccttgatcgtcgtccattcgaagaggttctgcgattccagtggcagcaggaggaattgatcgagcatgagaggttttcctttcaggaagccgaccgggatggtcccggtactgacgggctggacggcacgggtgtgccggccaggggcagaaggcgtgacggctggtcgagggaggcaacctcccagcggcctgcacggctgacaagagtcaggccgtactggctggtccgggtagtggattcgtcgccggtgg

SEQ ID NO: 402 - DNA, 988 bp, Propionibacterium acnes
cgttgccctcaccggtgcatccttgccctggcgggtctgcttagcgatcgccgacatgccgcctcgcaatgccgaaacatgattgtgggcgtgggcgatcgccgacatgccggccgtcgcgatttttgactggccctgcggggcccctgccccagcacgaatctgctggtaagccgccgacgtgccacgagcacccgccgccattcgcgccaccttcgcagccctagtcactcccgtcgacacgccacccgtggctaccgcagcagcacccgagaccacagtcgaggccatccgccttcgacccaatccggtgagcttgcgaccaccgctgcgcaccatccggcgagcaccccgcccagcccactggccgatcaccgagcccctttcggaacgcttgctgcgcatccaatcgttgatcttgtccctcagccccttctcgcccttgtgacgacgccacatggacatcaagaacccgataatccccacgagctcgagcatgttgacaaccatgaccttgatggcgacatcaccgtcagaggcgaaaaccgacttgatgatgagcatgaccacacccaacatcaccatcgacccgacaatgccgatcatcgagtacaagatcgaacacagatcccggatgagcggatctgtgcggccagggatagcccgcaacacgttgagcatcgacatgaacgccgaccacaccaacttgcacacgtagaaccagcacatgcccgcgaacaccagcaggaccacagccaaacccgccaccgtcgacgagtaaaagaagaaccccaccaaccacgaaccatccgcaatatcgccggcgtaatccgacaacccctcatcacagtcaccaaggtcgtcgcgagcatccgagacgtcatcgtaagggccacccttgagcacctcgatgtacttgtcgtggcacttcgcatcaataatgcggccatagttgagctgctgatgaaccggcgccacgaacgagtcc

SEQ ID NO: 403 - DNA, 1053 bp, Propionibacterium acnes
cgattttgtccacccacccctgtcgattttgtccgccaagtattagacaaaccattagacagtgaattagaccctgggtcgcgtcagcgtgttagctcaccaacgcgcgcgcgcgcggcggccgagccgccgaagccaaagaaacccataccaccaacgcctgaaccagcagcccccgcttcagacagtcctgtgtcagcgcacgctgatgaggctgccgagttggcgtggcggttcgtggggtggtgtcctcagctggtaggggcaccgaagaaggtgcgtggccagctccgtcagctggtcgctgccgagatccgccggaatccgggctggctggatgcgccagcgttggaggttgttgcccagcgggtacgtgctgaaggtgcgctgggggtccagcactgcgagattgtgcgagccgagctgcacggggtgatcgccgaccagaaggccgcccccgcccgccccgacgccctgcacgcgcgggagcccaagtggtgggacgacgtgtactacgaaggaaacacaaccgtgtggtacgactctgacgaaaccagtgacgacgacgaggcgtggaaccggtcgcaggtatgtcatgttgctgagcgtgacgacatggctggcgggattgctaccaacctgctggcctcccacgctgatgatccgatggcctggctgactcgccgtcaaaccatgctgatggctcgtttcccccacgcccagaacgaggtcatcgcgatgtgccacatcgtgcgcaccgccctggaggccgacatggccgccggaacccggtgggaggactgatgagggtctcccggcgcgccctcatggccgtggcccgtgccgacgctgccgcagcagaccatgccaccggccgatgggtggccacagccaacgccaccgtcgcccggctgaccggactgtgcgaacgcaccgtccaatacgcccgcgccaccctggtccacctgggcctgtgccgcgtcgtggccaccggccgctacctcaccgccgacgagcggcgcacggctgctcgcacccatggcggccgccaga

SEQ ID NO: 404 - DNA, 1009 bp, Propionibacterium acnes
gcgagccacgaccatcgccaagctgaatggagagcgagcatgagcaccacccctgccgggttcgacttcgacgctctggccgagtgggccgagagcgatgaggcgacccacaccccgcaaaccagccccgtgttccggggcaaggacgccgcgcgcgccagccgcgcattcctcggccgaggacggcccaccctcggcgcggaccacgccaccggcgagggccggtcgccccgccgtcaggtacggctcgacgcacgcaccaacgcgcgactcgacgcctacgcagccgcaaccggcaccagcgcctcccagatcatccgcgacgccctcgctgactacctgcccgcctgatcccaccccaatccactcgggcgcctgtcagtgccccctcttctgggtggtggtccggggcgtcaccgccccggaccagttgggtagtcatctcagttgaaataagcgattagtgatacgcccctcctgctttccggtgctgtcatgagcgtctgacaacagcgacacctcggggcagccgacggacagtcctctggctgccgctctgatcccatgcccacggcacgaaggtgtcggacagctcggtctcatcatgtgcccaaatagcgtcgtgggcctgtcgccaagcttctcgggagccccacacgggcacgaccgggccacaccggtgtcctggtctccagtgtcgcgacactgtcgatttcggtacgtgcaatgcggcggcggtttgacggatcgacatcccagactcccgcgcgtcccagatcgccatgtggagagtatttgcctccagtgcggccgccacacttgcacgctctcgcgcacgctcgaatgcccgcctagtgctctcaaatgtcgtcacgacgcctccccctgaaaatactcagggtgtcccacggtgggacaccctgagtatttcataccccaactcgcctcaccacacgtcgacctcgacaccgatcaagcgacccgtatcggcgacattgccgtactgctg

SEQ ID NO: 405 - DNA, 1029 bp, Propionibacterium acnes
caggtgggtttgaccgccagcgtcggattggtgctggtcgctgggctgatcaccactctcaaccgtcgttaccggacccggttcacccgtcagccccgcggcaaggccatgaccctgcccagcccggacgcccaaactgccgagatagcgctgcgcagcaccggggcgactgacactctgacgatcacctgcctcgaccaggcgctccgcgcgatcggcgcatggtgccaccactgcgggcacccgctgccacccctgctggccgcccgcgtcgatgacgaccggatcgacctgctgctatcccaggcggcccccgaccatcccgaggcggtggagctggccgccgacggatcggtgtggaccctcaccgccgaccggatcgacgacctgctagcccacaccgatgacaaccaagcggctccgtggccgtctctggtcacactgggacgcgacgacgacggcgcccacatcctcatcgacttggaagccgcaggaaccttgcacctgatcgccgatgacgaccaggtcgacgcggccctcgccgcgatcgccgtggaactggccacctgcgactggtccgacgaagtcaacgtcaccctcgtcggccaggtgtgcccgggcctagaagacgcactagagtctccgaccctgacccgcgccaccgacgtggacaccctcctcaccaccctagaagctcgcgccgacgaccagcgacacatcctcaccgaaggaaaccccctcgccgctcaccgagccgaccccgccatctccgacgggttcgacgccgaagtgatcctcctcgacaccaaactcaccgaagaccaccgcaaccgcctcgccagcctcgtcgaggctcttccccgcgtgtcagtcgccgcggtaacaaccagccccaccagcccagacgaatggtccctcaccctgacaggtgacccactagccgccgacctggctcccctcggctggcacatccacccccaaaccctctcccccgacctgtacaaccgcgtggttgaactgctcgccaac

SEQ ID NO: 406 - DNA, 1024 bp, Propionibacterium acnes
ccagcaggaccacagccaaacccgccaccgtcgacgagtaaaagaagaaccccaccaaccacgaaccatccgcaatatcgccggcgtaatccgacaacccctcatcacagtcaccaaggtcgtcgcgagcatccgagacgtcatcgtaagggccacccttgagcacctcgatgtacttgtcgtggcacttcgcatcaataatccggccatagttgagctgctgatgaaccggcgccacgaacgagtccacaatgatcgccgacagcttcggatccttcgagtctcccgtcgaggtcatgtcatcaggaatctcgacctcaccagcggtcgccgtcgcaggatcaaccgaactagtaatcatccgagacagcgccacaccgaactgctgggtgcgagccaacggagtagccaacgtcgtcgtatcgcctgcgaacttcgccaccggggccgccaagaaacccaacgccagcgccgcagcaatcgccgcacgcgcacccgtagcccacgccccagccgtacgtcccctcatcatcttgacgaccacgcccacaccggcgcacgtcgtcagcaacgccaacaccgttccaccccagctgtccgctcccagcggggccaaaaccttgtcgtggatgtcgttctgcaaccccaccagcggtccggtaatccacccgacccagctcatcgccacggtccagtccaacaaccggcacaacagggcaacgaccatcaggtacgtgttccaacacatgccaataatggaggcccacatagccttcagcggggccgtaacgccaccatcgtccatcgacatctggtactgaaacaagtgaataccgttggagtcagtcacattgaaaccgtcacccatccagcccagcccaggacccgacgccatggcaggcacactgctcagcgccaccaccagaaccagcgtggtgacgatgatacggaaccgccgctccccggccccggggcggcgtggatgacggctcacgctgtctcccggtcgtgctcgggcgggttg

SEQ ID NO: 407 - DNA, 985 bp, Propionibacterium acnes
tccctgcgaccagtgaaccgtgcccccactgcgcccacaatgatcagcacacccacggcgatcatcaggtgggcagcactaactgatcccaacgaaccaagatcaaacaagccctgcccgggagcgtcgagcagtccgtgggcgcgaagccatgctccgagattgccaatgatcttggggatcatcttgttcagtagggctatccctccgatgccgacaacgaggaagacgaggatttcttcgcctgcgttgtttcttcctgtgtttgcggtcatgctgccttctcggggtggatggccagccagctgatgaggttgtcggtgatctgccctgagatttggatcagttcgacttgcccggcctgccatgcccgcgatgtgccggccagcaatgatgctgggacccctactgcgcggccacgggatgcaacctcagccaaggcggcgcgtaactcctcgacggtgctttcgatgtaccaactgccgtcagtactagtctcagcggcatcggtggtagcgataagagcatcggtgaggtcgtcgacggcgcggtccagatcagcgatgtccggtagggctacaggagtcatggtgtgtcttccttctagggtgccttcactggtgaagggtccctagccccggccgatgtgcggtgctgtgggaaaaatgcttcccattggtccgtcttagttaggaaacttggcctaagtgctgtcgagggtcgcgtgttcgtgaccggttcgaagacactgccgccttgtcttcttgcccgtggcgcttccgagatggtcagtgggcgatggctaggccgatgagggcgccgctgcacaggctgggcgcccagggaaggaatcgggtggtgtggtgtcggaaccggtcgattagggcatatagggcgatcagggtgaggccggctatgaccgtggcgtggatcgtgtcgatgccggttgctgcgaccggggctgcccacagtggtgtgatgcgca

SEQ ID NO: 408 - DNA, 967 bp, Propionibacterium acnes
ggtgggcgctggaccaggtttgcggggcatgcgcgcatcggtgatcttggccgccaccaggtgttccagattgtccaagtgcccggagtcagaggtcagcagaagagtagtcacctcgaccgcggtggctgaggcgatctgagctgtgcggcggtcgtgatgggtggtgtcagtgctgacagctgtggtgggagcggatgccggggccgccgaacggaccagggcaacggggccgcatgcgactccgcacagcacgagggcaaggaagcctttggtggccatcgatccggtgtggggccagggacccacgttttcctgtgcctgttttttcttggccgaccaacggcgggacttagggttagcggatgcaccttctggggtgcatgctcgtctcaatcgcatcggtcacctccttcactggatgaagggaccaaggaggtgaccgatgtgcggtcgaacccgaaaaagttcaaacttttttctgggtctgcctcaagtacgacagaaggcctgcatcatcacggcgttgtggtagcagatcttgcgtcagcgcaaatgtatgggcctcgtaggagtagctcttaggtgggtcccggtggttgcggccagggcgagggtgtcgggtatgtgtagcgctagtcccgggttcgtggtgtgagggcttttgggtgctgacatgcactacccattgctagacgctgtgctgtggcatggctggacgtctagcagacgggttgacatcacctttaggctggcagcgcccgaggccgcaggccagaggaagcggacagcctaacgattgacgtccccctctcctttccccaacctcctggagtcgatgacccggagatagatcgatgtctatgcatcggtgcatcgatatacctatgtatctgtctgtggtttttagaggccactcccgtcgccccgggccgctcagcgataccgcaaggctgtgtgggatcag

SEQ ID NO: 409 - DNA, 1055 bp, Propionibacterium acnes; identical to SEQ ID NO: 159

SEQ ID NO: 410 - DNA, 997 bp, Propionibacterium acnes
cgctcctgccagctcctcggtggtctcaaagtcaggagacgagacagtgacggtgataagagcctggatctcgacctcacgctcatcggcggccagctcggcgttgtagtcgacgagcacctgagcggaatgctcgatagacatgagggtcgaagcctgggtcatctcaccgccctcgacgttgtcgagctggtcgacggtttggcggatggcccgctgatttttctgcatcgcagcgtgacgggtccgggccactccccggatcgccacgtcgaccggcacgccagtgtcgtcgatacggcccaggaactcgtaggcaggccacgtcatcgtgcggggcaccttgcccagcgcaatgtgggactggtagacggtctcgccggtgtcggcaccgattttgaggacgcgacgattccacgcctgagccgtccgggacatgtgggagactcgcttgtcatcctcgctggccagcaggtcggaggtcgcggcctcatcgatgaccaactcccccagcgcggcacgtccaacctcatccatgagggcgattccctcgccaggggcatcatcacgcaaccgggtcgggtggcctgacaggtgctgccgaagccagatctgttcatcaacggtgaccgggcggggttggaacgctgccggcagtttcgcaccgaattccttagcctgacggagggcccactcccgtgcgacacggccaggagcggtggtcatgagtccggcggcttcggtgattttgttgagggcggcggtccaggcggtgtgggtgcgtattttctggtcttggttgagtttgatcgataggaaccacacgcgccggcctagggattcggtttcaggctggtcgagggtggcgtcgatttcgtcggcccacacggggtgttcgctcaggtcgaggccggcggccatggcgtcgacgatttctgcggggtcggtccaggtgagggctccgttgaggcagaactcgtggcgggcgaggtggcgg

SEQ ID NO: 411 - DNA, 1162 bp, Propionibacterium acnes
cccatcgtttacatcctcgactggtccctgcgaccagtgaaccgtgcccccactgcgcccacaatgatcagcacacccacggcgatcatcaggtgggcagcactaactgatcccaacggaccaagatcaaacaagccctgcccgggagcgtcgagcagtccgtgggcgcgaagccatgctccgagatgaccgatgattttaggggccatcttcttcagcagggctatccctccgataccaacaacgatgaaggcgaggatttcttcgcatccgttgtttccttctccggtggggccgttcatgctgccttctcggggtggacggccagccagccgatgaggttgtcggcgatctgccctgagatttggatcagttcgacttgcccggcctgccatgcccgcgatgcgccggccagcaatgatgctgggacccctactgcgcggccacgggatgcaacctcagccaaggcggcgcgtaactcctcgacggtgctttcgatgtaccaactgccgtcagtactagtctcagcggcatcggtggtagcgataagagcatcggtgaggtcgtcgacggcgcggtccagatcagcgatgtccggtagggctacagcagtcatggtgtgtcttccttctagggtgccttcactggtgaagggtccctagccccggccgatgtgcggtgctgtgggaaaaatgcttcccattggtccgtcttagttaggaaacttggcctaagtgctgtcgagggtcgcgtgttcgtgaccggttcgaagacactgccgctttgccttcttgtcagtggcgtttccgagatggggtcagtgggcgatggctaggccgatgagggcgccgctgcacaggctgggtgcccaggggaggaatcgggtggtgtggtgtcggaaccggtcgattagggcatatagggcgatcagggtgaggccggctatgaccgtggcgtggatcgtgtcgatgccggttgctgcgaccggggctgcccacagtggtgtgatgcgcacgtcggagaagccgaagccgcctcgggagatgagccaggcgatcatccacgctgcgaagatgatggtggtagcgatgacagcacgtgttgccgcagtctggtccgagagggcggtaacggctacagccccgatccatccggcccatcc

SEQ ID NO: 412 - DNA, 933 bp, Propionibacterium acnes
ccccgactaccagacccgccgtcgtgaacgcagggaaaccctgcgagccacactcagggccgcccagcagcatgtcaggacacactgatacccgctcatacacacaccatgaaacacgacaagccacctgacagtatcagctgcaagacgcatgacaacatagaaggacatgatgaaatacacatagacacaaccccgcacagcagtttcgcaacaaatcatgatagtctcatggcagtatcgcttgatacacacatagcatcactcccacataggcagttatgctgatatactcctactaggttatccgtccaacatgctgagtgggttcctgtacagcatgaaaggagcatggcatgatatgggccgttctcaactgcaagggtggtgtcggcaagacgaccagtgccctcctgctggcggcagccgccgccaagcagggccacaccaccctggtggccgacgctgacccccagggcaccgcatcccagtggtcagccctggcaaccaaaaacgacgaacccctgcccttcccggtgcaagcggtcaacatcgccaccatggaggcactgcccaccaccaccgacgcccatgatctcatcctcgttgacacacccccctcggcaggcgatctgatgttccaggcatgccgcatcgccgacctcatcatcatccccaccgccacctccggacccgacatctcccgaacatgggtcaccatggacgccacacaaggcacaccacgcgcgatcctcctcacccaaaccgaacacaaccgtgtcgtctaccgccaagctcgcactgccctcgccgccgacgacaccgtcgttctcctggaccacgacatcccccgccgtgaatccatccgcacagcatggggcaccaaccccccagacgacgtcatcacctactacctgcccgtcctcaacgaac

SEQ ID NO: 413 - DNA, 928 bp, Propionibacterium acnes
gacgacgacgaggcgtggaaccggtcgcaggtatgtcatgttgctgagcgtgacgacatggctggcgggattgctaccaacctgctggcctcccacgctgatgatccgatggcctggctgactcgccgtcaaaccatgctgatggctcgtttcccccacgcccagaacgaggtcatcgcgatgtgccacatcgtgcgcaccgccctggaggccgacatggccgccggaacccggtgggaggactgatgagggtctcccggcgcgccctcatggccgtggcccgtgccgacgctgccgcagcagaccatgccaccggccgatgggtggccacagccaacgccaccgtcgcccggctgaccggactgtgcgaacgcaccgtccaatacgcccgcgccaccctggtccacctgggcctgtgccgcgtcgtggccaccggccgctacctcaccgccgacgagcggcgcacggctgctcgcacccatggcggccgccagatgcgcgccgcctccacccgcgtcctcaccatgtcctgcgcaatcgtttgcgccctaccccgaaggggtcaccactacaggaaagttaagttcctagatggtcaccaacgcacgcgcaggcgcgtgcgaaggccagcaacaccagagaagaaacccctgtggctgcaaaaactcgcagccctcctcgaccagcacctgccctggctggtgagaaaccatcacatcggccgactgtgccacgccctcaccgccctgggcatcgacgaacactggcaacccgcagacctcgacgccctcctcgacgccatgaaccgcaggaaccgtcgcctcggcctcgacgtgccatgcgccgacgaccagcacaaccccttgggactgttcatccatcaggcccgagacaccctcacccacgacaacccccatgaacgccgcct

SEQ ID NO: 414 - DNA, 957 bp, Propionibacterium acnes
ggcagggtcgtcgggttcttcggttacctcgggtggggtcgatctggctgtctcggtgtcgtcggccaggtcggctcccaggatgcgttcccattcggggctggttttcttgcccgctgaggccatcgtctcgtcgatctgttcgtcagtgggccacacaaatttctttttggtccaggtcgtggtgtcgggtcgcagctgatccagcagttccaggtcttgcggggagtgggccttgcgggggtcgggggtgtagaagaattggacttccttgggggctgattcgccggataggtaggtgcctcggccgcgtttgccgaacgggatgcccacgccgacgtgttcggagccgaacatcatgcgggctccgtcagcggacaggggtccggtggcggcacgcccggagaagttgtctcggatttcgccgcccaggaactcggcgtcggggcgttgggtccccagatcgacgtggatacggcaggcggctgccatgcgcagcagggagccgatccagccgaaaacggggcattctccgggcatcccagagaccttgatcgttgaccaccagtttttcgcgttgccgtagaactggcggtactcgtcgatgaggaccagcacgcgggtgaagtcggtctcgcgggccccttcttcttcgatgcggcggtagcggtcctccatgagagaccacagccagtggatgagggcgacctggtcggggacggtagtggcgaccatctcgatgttgggccactcccgcaggcccaggtactcgatgcgtttagggtcgatgacgaagacgcgccagttgcggcgggcaccctcgacggcgtcgccgatcatggacaccgtttttccggtacgggtgcggccggccttgagctggtgggccatgacaccggagatgtcccagaaacaggtgttgccgtcctcgtcgacggcctgggggattttctccca

SEQ ID NO: 415 - DNA, 947 bp, Propionibacterium acnes
ggctccggagtcttaggctccggcttcacatgcctaggcacttcggctgcggtgggaggagtcagcacgtggcgtaccggcttggtgaccttctgggcacccgaaacaaccggcttagacaccaccttggcacctttgaccaccggtgcggctgccttagcgccggccttcttgactgcacgatgcgctttgatagccccggcctcggcccggccaaccctactagcagtagcatcgagggctctgtggcccgtcgttgccctcaccggtgcatccttgccctggcgggtctgcttagcgatcgccgacataccgccccgcaatgccgaaacatgattgtgggcgtgggcgatcgccgacatgccggccgtcgcgatttttgactggccctgcggggcccctgccccagcacgaatctgccggtaagccgccgacgtgccacgagcacccgccgccattcgcgccaccttcgcagccctagtcactcccgtcgacacgccacccgtggctaccgcagcagcacccgagaccacagtcgaggccatccgccttcgacccaatccggtgagcttgcgaccaccactgcgcaccatccggcgagcaccccgcccagcccactggccgatcaccgagcccctttcggaacgcttgctgcgcatccaatcgttgatcttgtccctcagccccttctcgcccttgtgacgacgccacatggacatcaagaacccgataatccccacgagctcgagcatgttgacaaccatgaccttgatggcgacatcaccgtcagaggcgaaaaccgacttgatgatgagcatgaccacacccaacatcaccatcgacccgacaatgccgatcatcgagtacaagatcgaacacagatcccggatgagcggatctgtgcggccagggatagcccgcaacacgttgagcatcgacatgaacgc

SEQ ID NO: 416 - DNA, 926 bp, Propionibacterium acnes
ccctgcgagccacactcagggccgcccagcagcatgtcaggacacactgatacccgctcatacacacaccatgaaacacgacaagccacctgacagtatcagctgcaagacgcatgacaacatagaaggatatgatgaaatacacatagacacaacccagcacagcagtttcgcaacaaatcatgatagtctcatggcagtatcgcttgatacacacatagcatcactcccacataggcagttatgctgatatactcctactaggttatccgtccaacatgctgagtgggttcctgtacagcatgaaaggagcatggcatgatatgggccgttctcaactgcaagggtggtgtcggcaagacgaccagtgccctcctgctggcggcagccgccgccaagcagggccacaccaccctggtggccgacgctgacccccagggcaccgcatcccagtggtcagccctggcaaccaaaaacgacgaacccctgcccttcccggtgcaagcggtcaacatcgccaccatggaggcactgcccaccaccaccgacgcccatgatctcatcctcgttgacacacccccctcggcaggcgatctgatgttccaggcatgccgcatcgccgacctcatcatcatccccaccgccacctccggacccgacatctcccgaacatgggtcaccatggacgccacacaaggcacaccacgcgcgatcctcctcacccaaaccgaacacaaccgtgtcgtctaccgccaagctcgcactgccctcgccgccgacgacaccgtcgttctcctggaccacgacatcccccgccgtgaatccatccgcacagcatggggcaccaaccccccagacgacgtcatcacctactacctgcccgtcctcaacgaactcatggaggccctgtcatgaccaccaagaaa

SEQ ID NO: 417 - DNA, 930 bp, Propionibacterium acnes
ccggtttcggctgttgcttcggtcttcatggtagctgatagcccgcgtcgttggaagtgcgacgacgccgatcctcatcggtatcgcaccctgttccagggtcgagaatgtgaaggattaacaaccatgacaagtcatgagacgccctccctgagggcgtcatgaccgctttaattcaagctctgccgacagctgaactgtctgctggacctggtgctagcagtccagctagaccctctgctgagggcttcatcaagattcatcacgaccttattagtgcgggcgtgtcgggtaacgcgatggcgttgttcgtcgcgttacgtaaccagcccggctgtgatcagtggacccgtcactcgtacctgcggctagcccaatggtgcggctgggatgggctgtcggaggcggcgggctgtaagcgggtgcagcgggccgctgctgagctcgctagcggtggttggctggaatcgcgggtcggccatgatcgtcgcaccgctaagacgctggtgtggcatcggttgaccagccccgacaccgaccgctgggagcaattgccgcggattgtgtgggcgaggatctgccagatcgccggggagacgtcgggagagtgggtgaggcattggctggtgtggcggatgctggccggtcgtactggtgtggctcaggcccctatgtccatcgtggctcggttcctgggctgttcttcgcgccaggtctctcatatccgtggggctctcgttgatgccggtctgctcggctgtgacgaggtctcgggggcggcgagccgggtgtggttcccctcgatggccgaggagtgtgcagcggatcgtgaggtggttgatggggccgtcgtcgatgctggggtgggctctggtgaaggtgtcgaggagggcggggaacccctgtcgattttgtccacccacccctgtc

SEQ ID NO: 418 - DNA, 909 bp, Propionibacterium acnes
aaccaggaacgaggacgataggccgatgctggtcaggtcgcgatgttgaagtcatggagacatatttgcacagtgcgcggacaagggagtggcactatttctggcatgaatttagatctgggtgtccggtgaggcgatcagaacgcctccatgtactgtccgagtgtctacgatgcagcggacacagtcgagcagctggctcacaagtttccaggtgtccttctgcccctatgagggaagtcggctgctctcgcaacctttgagggctgctctggggtcggaaccagttacagatcgttcaagttccgggaactaccgccggtcacgctgattgattcccgggcgatctcgcttctgacgacagtggtcggtgaccgagaggcgtcctactctgaccccgctgctgcggtgagtaaatcacgggcgtcccggatccggccacccgtccaagtgccagccagcttgatcggctaggcatcgtcaaggagcgacgatgaggtgatgatgcgatgtgagcgcaccgcgaagtgaggtataaagaagccttcccgggcgcatgcgtcgcccaggaaggccaggttggcccctggacggctgaatggttgggcggatcaggctgtagcggagacgtgcagtacctcgtaggcgatggcgttggttgggctctggtctgcatcgtggctactgagttcgacgaggatgacggtccaggtggtgatgtcgacggcggtgacgcgggcgatggtggaatcagtggatgctgcaaggaagtcggcggttatgtcttcgatgcagtgggacggagcagtgctggtgggcaggggcacggtcttgacggtcaggcttcgggcagcagagtaatcggcggttccgttaacaagctggtggacggtccagtcctggatcggg

SEQ ID NO: 419 - DNA, 939 bp, Propionibacterium acnes
gtgacgacatggctggcgggattgctaccaacctgctggcctcccacgctgatgatccgatggcctggctgactcgccgtcaaaccatgctgatggctcgtttcccccacgcccagaacgaggtcatcgcgatgtgccacatcgtgcgcaccgccctggaggccgacatggccgccggaacccggtgggaggactgatgagggtctcccggcgcgccctcatggccgtggcccgtgccgacgctgccgcagcagaccatgccaccggccgatgggtggtcacagccaacgccaccgtcgcccggctgaccggactgtgcgaacgcaccgtccaatacgcccgcgccaccctggtccacctgggcctgtgccgcgtcgtggccaccggccgctacctcaccgccgacgagcggcgcacggctgctcgcacccatggcggccgccagatgcgcgccgcctccacccgcgtcctcaccatgtcctgcgcaatcgtttgcgccctaccccgaaggggtcaccactacaggaaagttaagttcctagatggtcaccaacgcacgcgcaggcgcgtgcgaaggccagcaacaccagagaagaaacccctgtggctgcaaaaactcgcagccctcctcgaccagcacctgccctggctggtgagaaaccatcacatcggccgactgtgccacgccctcaccgccctgggcatcgacgaacactggcaacccgcagacctcgacgccctcctcgacgccatgaaccgcaggaaccgtcgcctcggcctcgacgtgccatgcgccgacgaccagcacaaccccttgggactgttcatccaccaggcccgagacaccctcacccacgacaacccccatgaacgccgcctggcccgcgaacaccaccgcgcccaactcatcgacgaccaactccgccgccgcgcagaaac

SEQ ID NO: 420 - DNA, 967 bp, Propionibacterium acnes
gacgccggccaccccaactactccgacccacacggtgaccccagctccggcctctgccggccactcgaccagcgacgagcacccaatccatacggataccgccacagcggacaaggccagcaacgaggacgccctgtccccaatccaggtgggcttgaccgccagcgtcggactggtgctggtcgccggactgatcaccaccctcaaccgccgctaccggacccggttcacccgccagccccgcggcaaggccatgaccctgcccagcccggacgcccaaactgccgagatagcgctgcgcagcaccagagcagccgagactctgacgatcacctgcctcgaccaggcgctccgcgcgatcggcgcatggtgccaccactgcgggcacccgctgccacccctgctggccgcccgcgtcgacgacgaccggatcgacctgctgctatcccaggcggcccccgaccatcccgaggcggtggagctggccgccgacggatcggtgtggaccctcaccgccgaccggatcgacgacctgctagcccacaccgatgacaaccaagcggctccgtggccagctctagtcacactgggacgcgacgacgacggcgcccacatcctcatcgacttggaagccgccggaaccttgcacctgatcgccgacgacgaccaggtcgacgcagccctcgccgcgatcgccgtggaactggccacctgcgactggtccgacgaagtcaacgtcaccctcgtcggccaggtgtgcccgggcctagaagacgcactagagtctccgaccctgacccgcgccaccgacgtggacgccctcctcaccaccctggaagctcgcgccgacgaccagcgacacatcctcaccgaaggaagccccctcgccgctcaccgagccgaccccgccatctccgacgggttcgacgccgaagtgatcctcctcgacaccgaactcaccgaagac

SEQ ID NO: 421 - DNA, 882 bp, Propionibacterium acnes
ctctacggggccatcatcgccgcctccaccctggacccccacctcagcatcgacgccctagcccgcctctaccagctccccctcgacctcgtgacccaagccctcaccgtctaagcgtcgatgagcgggggagaggtagcgcactatcggctaaggaaccccacaaacaccaaacccttgtcactgggaagggtttggtgttatgctggtctcacaactcaacagaggaggtgagacatgggaaatgagtaccagaagtcgctcaaagtcctgttcaagaaactggaatctgagcaaggagcccgcatcgagacccggcgcaaaggatggatgatctacccgccggatacgtcacgatcagcggtcatgatccacaagactccatcagatcgcagagcatgggccaacatgctttccgaactgagacgctcaggattcaccgtctaactcagtgaagggggctggagctccagccccctttcaaccacctcccccggacaccacacaagaaaaggagaacatgatgtggcacgttcggttgtcgcttcgcgcaatcagcgaggacatgctgttcgacgccctggacaccctcgaccccttatccccggtggccacactgggccccgatgagcacaccggatcattggcggtgttcgtcgaggctgactcactgacagacgccatcgagactgcccgcacagccatcaccaacgcatgcaacaccgccaccataaccggcgtagaagcccgccccgaagacgaatgcttcgcagacgttgaccggcccctgttcccgccagtggtcggatacaccgaaatcgctgaaaccgcaggactctcacgtcagcgcatccgccagctcgcaggcaccgccgggttccc

SEQ ID NO: 422 - DNA, 880 bp, Propionibacterium acnes
agttggtatgcccgcgataagaagggcaccgtcaagatgatcgcattcaactcaacggaggtccccacatgcgacgtcaagtaatcaccgcggccgtactgggcctggccctggccaccacctccctgcccgccctcgcaggcggcggcgacttgaacggcagtgtggacacggatggccctggttacgatgtgcgtactgaggtggattaccatcacaccaccggtggtgcgggtgggggtgccacgacagggggccatcatgggggcaaaacccacggtgatggtgaaggtgaggctattgatgggcgttctcgcgccgatgccgaagccgaactagacgaagccgaccgtaaccaggacttgacttgtgatgtcttgctcccaccggcgccgaataccccagccggccaggaatgggcgaaagaatgcaatcccccagcgaaaaaggggcagaaggccaccccgaagcccgatccggtgttagtgggccgtcacgcggccttgcagctcacccttcccggcgcggcccctcgtatcgatccgtcccccgaccttaaccggtggcactcggcagcagtgggccaggctttgtggttgtcggttgatgaccccaccgccactacgcagaaatcgatcacgtttatgggccaggttgtctcgttgagcgccaaacgtaacggtttgtcgtttgatatgggtgatggtcatgtcgtgcactgtgatgccacgacgacatggacggagtcggtggaaccggggaccccctcacccacgtgcggttacacctaccaacaggcagccccggccgggggctataaggtcaccgcaatcacgtcgtgggatgtgacctggtcggtactaggacacacgggcacagt

SEQ ID NO: 423 - DNA, 1061 bp, Propionibacterium acnes
gaaggttccctagacccggccgatgtgcggttctgtgggaaaaatgcttcccattggtccgtcttagttaggaaacttggcctaagtgctgtcgagggtcgcgtgttcgtgaccggttcgaagacactgccgccttgccttcttgcccgtggcgtttccgagatggggtcagtgggcgatggctaggccgatgagggcgccgctgcacaggctgggtgcccaggggaggaatcgggtggtgtggtgtcggcagcggtcgatgagggcatatagggcgatcagagtcagcccggctatgacagtgacctggatcgtgtcgatgccggttgctgcggccggggctgcccacagtggtgtgatgcgcacgtcggagaagccgaagccgcctcgggagatgagccaggcgatcatccacgctgcgaagatgatggcggtagcgatgacagcacgtatcgccgcagtatggtccgagagggcggtaacgactacagccccgatccatccggcccatccggtccacgctaggactgccggtatccatgtggtgatggcgtcaatgacggcaacccatgccccgatggtggctagcagggcccacgtcggccacgtgggtgctggggcccacattgtggcggcgatcatggtgaccgcagccgcggcacagaccgcgatcaagcttcggagactgtaggtgtcgcggtagacgatcttgtcggggctggcggtagctggttcgggcaggacgcgggtgagggcaggccatcctgcgaccgcaatagccgcgacggcgaccacccacacgatctgttgcatgggtctcatcatggcccatcatcgatgagtatgggtggccgacatggggtcactcgtagaggggatcgaggggtgtgcgggcgagcatggcttcctgtgtgccgagcatgagggtgccagaatcctcgccagccgattcccagtcgacgatgacctggtcgccgtcaacgctggattcggcgatggtcacccattgcccgtccatgtcgatgagcatcccggcggccagctctgtggcggcaaccggg

SEQ ID NO: 424 - DNA, 26620 bp, Propionibacterium acnes
ccttgtggacaccacgtcatccacatgacttgtgtcacatgattcccggaccatcatcaagcagatgctcacccaactgtaatgatttctgttctgaatctggacatgctctgacctgcattcaatgatcaattccgtgcgatattccacaacgcacggggaggtcgcagacaatgacaacagaaagcatccccacgcggctgctcgtgtggcacgagcagaccgatccgaccaagctcctcaggatcaccgacgcgatcaggaggggggatccccttccccccatcgaggccatggcgatcggccacagattcctcgtcctcgacggtgcgcaccgggcccaagcccaccagtactgccatcgatctgagatccgagcccgcctccacaacctccccctcagcgcggaaataccaggctggagccactccataccccgcgatgcagcagcgaaactggctcacctactcctccccgtggacgctctcggtcaggcggaaatcgtcctgcacggggtgcgccgtcaggtggggaccgcttcacaacgaccgcgcgacatctttctcgcctgccaccggatcgcgcgagttgcctacgcgcatggaatcagacctctcggcccggagttctccaacgctccgacgatcgacgccgccaccatgacctggcgcccgccgaacgtgggcacgttgtgggccatcgccagcagtctcggacccctgcccgcaactgtgacccggttcgccccgatcctccggcacgacgccatcggggattccgcgatgacacccgtcacctccgccgcgtgacgacccgcgccaattccgccccaccactggatgaggggcagccgcgtggacgatgctcctgttcaggcagggactccatacgagaccaataggaaaatcatgatcaaaaacacaagccctctgaccgtgaaaaatgtctcgaaaacattccgtggctccagcggagaagccatcaaggccgtgcaagacgtgtcattcaccgttgagcgtggtgaggttgtggcattcctcggcccgaacggcgccgggaagtccaccaccatcgacatggctctcggcctcacccgccccgacagcggccagatcgaggtcttcggtactgacccgctcagcgcggcccggtcgggacgctgcaccgcgatgacacagaccggcgggttgctgcccgacctcacgattgggcagaccatggagatcatctcctcgctctatcgtggctcccacatgaatgcctgcatggagcgagcaaggatcacgcatctggccgatcggcaggtgtcgatgtgctcgggaggcgagcgccaacgacttcgcttcgcactggctctgctgcccgatcctgacttcctcatcctcgacgagcccactgcggggatggatgtggaggcgcgccgggacttctgggcagagatccacgaggacacgcgtcgtggtcggacaattctgttcgcaacgcactacctcgacgaggtggacgagttcgccgatcgggtcatcctcatcaaggagggccgcgtcatcgccgacgacacctccgacgcgatccgcaccatgtcggggggttgcaccgttacggcgaccattcccgacttctccctggcacgactgaatctgccgggcacccaactcatcaagcagggcggcgcacgcgttgatctgcaccatcccgattccgatgccctcgcagcgcgagtcatccagctcggcggcaccgacctgcgcgtggtcccccgcagcctcgacgacgccttcctcgctctcacctcaaccaccaaggagtcctgacatgaccgcccaagcgcttcccgcagtcgccactcccaaggcccgccaccgatccgccatctcgctgaagtacttgtggtgcgagatgcgtcgccccttccggcgttcgacgatgctgttcaacctcgccctccccgcagttctgtacctggccctgttccgcaccgtccacaccgccgagctgccggacgggaacttcgcgatgtggatgatgatcggcatcgctgtctacggagcggccactgcgagcaccagctacgcagcctccatctccgtcgacgaggccaacgggtggacccgcaccatccgcctgacgccgttgtcgtcggtcgggtacgtgctggtgaaggtcctctgcgccatggccatcgccctggccccgaccctgctcatcggtctcatcgggctgttgaccggagctcacggcacgctgcgggtctgggtaatcggactgggggcggcttggctcagctcagcaatcttctccgccttcggcctggctctcggactgtccctgcgtcccgaggtcgtcatgcacgtccccggcctggtcatcaccggtctggcgttcctgggcaacgtcttcgtccccctcagcgggacgatgctcaccattggccgctggagccccgcctacggcatcaccgcgctggctcgttacccgctcaccaacggcatcgacatcgggggcggccacgactccctgacggctgccctcatcggcaccttctgctggttcgccggattcgtgttctgggcctcccgtcgatttaccaagagcacgggtcgtcagtgacagattcggccgatctccggaaggagcagtgttatgaccaagcccctcattgcagtggtcaccgcgggccaaggagcgcagaagcctcgcctgctcacgccatggctcaaggtccccggcgtcacggagaagcttgctgcatggtccgctcaggccgatgtggacctcgtcgagctcggtaccagggcgaatgcagaaaccttggcagcgaccgagaatgcgcagccactactggtctgtctcggagtcctcgtctcggatctcctggccgaccagaacattgtgctcgcaggacactccgtgggcgagctgacagcagcgtgtctcgccggggtagttgatcccgggacggccgtcactcttgcacgacggcgtggactggccatggcgcgggcctgcgctctccacccgaccaccatggcggccatcattggtgacaatccggatgacgtcctccggcggctctcggaactgggactcacggctgccaacatcaacggaggcggacagattgttgcggccggctccaccgacgcgatcgcggaactggtggcgacccctcccaacgggaccgcagtcaagccgttgcgagttgctggcgcctttcacaccaagtacatgacgcctgcgcaggacgctttcgcccaagctgctcaagacgtcaccttctccgacccgcagcacccgatcatctccaacctcgacgggcaggagatccggtccggcaatgacctgcgtgaacggctgattgcccaggtgaccgcgccagttcgatgggatctctgcatccagcagatcgcggatcgtcagccggaactcgccctatcggcccctccggggaaggtgcaggcgtcgctcttgtctcggcagatcccggacctcgcgacggtctgcatcaccacaccacgggaggcagcccaggctgcacagcggatcgaccagtccgtatccgtccttcagggggcatgatgctcatccccgagtacttcctcacagcctgttcggaccatgctgagcgcctggcgatcatcacccacaatgacgttgtgacgtgggccgaactggcgactcgcgtcgacggttttcggcgctggctgcgggaccatggcgtgcaccgccaggacagggtcgttctccagacgccaagcaccgtaggcacggtagccctcatgtgggcctgcctgctcgacggcgtgacgatggtcccggtgcaccaggacctcactgcctcccaggtgcagcaagtcatcgacgactgccgtccagctctggtgtgtggcagcccggacctcgtccaactcctcaactcccccggaatgaagacaagcacacctccaacgcggccggagtcaacgagtattctgccgtccttgtcccgggtcagccccgatgaccttgcgatgctcatctatacgtccggcacgacgggtctcccgaaggggatcatgtgtccccaccggcaggtcgccaccgccgcacggaccgtccatgactgtctcgggtaccgcacggacgacgtcattctctgtcgcctgccgttgtccttcgactacgggctctatcagattctgatgtctgccatctccggtagcgcggttgtcctgcgggacggaggcgcgcaggaccgcaacctggtgcgcgacatcgcccgtcacggcgtcactgtcgttccagtcgtgccgtccatggcgtcaatgctcatcaccctgcagcgtcgtgatcagttgccgaccatcgtcagactgttcacgaataccggggcgcgtctggcacccgagaccgcgaaccagttgctcgcaagcttccccggctcccgctatgcgtcgatgtatggcatgacggagtgcaagcgcatctccatccttccggtggaggagtacgagacgcatccggacagcgtgggaagagctctgcccagcactcacgtcgagatcgttgacgctcagggagttccggttccggcgggcgagcacggggagatcacggtgtccggcccgaccgtgatgaacggctactggcaggtgccgaacagtcccagtggacgattccgacccagcggccacggcctcactctgttcaccggtgatcgcggctggatggatgaggagggacgtctctacctcctcgggcgcgacgacgagatcgtcaagcatcacggcatccgaatcagcctgcaggagatcgagatagccgccgaagccgcgccgggcgtcgacgcagtcatcgctctcaagccggcctccgactcggcccccattgaaatcgcctactgcggcagcacgagtcccgagaacctggcccgccatctcgaaaccgtcctggaccgggcgcgacgaccccaattcatccaccaactccagcagatccccctgacccgtaacgggaaaccaaaccggtcagcagccgccgaggccatccgctcaagggcgtgacggcgaaggccaacacccacagacgaaaggaaaccaccatgacccaggccgagttcaaccagttcatcgagtccacctgctccgcgacgatcgtggatcccgaccgtcctttggtcgatcagggcatcgactccctcggaatgctcaccctcatggtcgctatcgaggacagcctcggcatcgaactggatcccgagtccctcgccgacggtaggggttccacgccctccggtcttctgtcccttgtcgagcagccgaaagcgacggtgtgacgacatgacgacgatggttccttgccgccgtgtggagatgccgcaactgttcgaccacatccccggaagcatctctctctcaggagggctgcccgatctgagcgtgctcccgagcaatcagatcgccgaactgacgtcccggatcatgcgtctcggctcaagaatcctcctgcaatactccaccccttcggtctcgtcctccttggtgccggccatcctggacctggcggaacgaacatgcatgtcaccggatccgcggaatctgatcccgaccgcgggttcccaactgggcctggccatggtgatcaatgcctttgacggcgatgagatcatctgtgactgcgccacctatcccggggcgctggccgccttcgcctctgccggcgtggaaacaacgggggtggccagtgacgaggaggggctcaacccagacgcgctcgctcacgccgtcgcagagggtcgggccaatggccgccgcatcgcagccgtctacaccacgcccaccttccagaatcccaccggctccgtacagtccgagaaccgccgtgcggccctgctcaaggtgtgtgctgacaatgacctcctcctcatcgaggacgatccgtacggcatgctgtccttcgacgggcagacgtggccagctctgaagtccatggacccacagcgcgtcatctacctgggcaccttctcgaaggtgttcgcaccgggcgtccgttccggctggatcgatccgcccgccaatcttgtcgagaaactccgcgctgtgtgcgagatcatgacactctcgccatcagccctcaaccaagcgatcatcggcgagtaccaccgtcgtcacggatgggacgaactgttggagggctatcgcgcctcctaccgcgaccgagcccgtctcctcatcggggctctcgaggctgaactggcaagaacgaattgcactggcacgtggacctggcgtgaaccacggggcggcttctacctgtggttggagaacgtcgccagcaccagcggtatcgacgttgcgcgtcgcgccgccgacaacggagtggccgtggtgcccgggaaacacttcgacgcagccggacacgattcgccgagcctgcgggtgtcgttcagcaattcacgcccggctgatctggtcgaaggagctcgtcgtctcgcccgtgcactggtgggagaggacgttcagaaatgactctcgcgacacgcaccgccaccgacaccctgcagcagaccttgccctggggcacccacgaacgtctcgtcttcgggcgggcgctcctgcgcagcaccggcttcccagccgaaggcttggccctgctcgactccgacgacatcctccccctcctcgactcctttcttgccggggacatcgacagaactcacttcgagaaggaatacaccagtcgcgaggagtccggcgcaagggcgctcatcaacgtcttgaaggacgatgcagtatcgcgcgccatcgcatggcagaaccccaccgcgtggaggtccttcgaatccctgtcgtccacgagcggaatcaatgcttcgactcggcgcaaggtacgccaactcgccctctactggcaacgttactgttccaaggctgagaccattggatacttcggcccgttcgcctgggccgaagtcgacccggaggcctctgcggtcgaattcatctcctccgaccatctgatcgaccgttcccacgtcgcaatggaggcgtgggcggtcattgagatcgggaaagccctggcatcacgggccgaccttcagtggtggatgccaccaatcctgtcccccgccgtcgacctcaacatggagagaggcaccgtgacggtggctggacaccagccacgacgggtccgggaggacgaggcacgagttctcttcctgaccgacggcacccgtcccgccgcccagatcgccaagagcctcgacatggagcccgagcggttgcgcaggatcctcgtggcccatgaacgtcgtcacaccgtgatctgggacgccaacatccctgtctcagtgcacgcgtgggacatcctgcacgaacgcattgcccagatcggagacgctgggctgcgagatgaggccactgctgttctcacgaggttcgacgagcttctggaggtcatccgcaacattcccgacgcccggtccctgacggaggcgacggaatccctgtcccgtcttttcgaaaccgtgacaggaacctcttcgaacagacgtgcgggccaggcatatgcagcccgcagcctgtgctacctggactgcacccgcgccggaaccgccaaggttgggacccggcttctcgaagccctcgacgcccccctcaacctcgtcctacaatccgctgactggttcgcggcgaccttggcaaaggaatacaccaccgaaatcacggacctcgcaaatcgaaagcagcgggcctcccaccagccactgaccatggctgatgtctggccgtccacgatgtcgctgttctggggggactcaccgtccccactgcagcgagccgtgaccgaactgtcacggcggtggagcagagtcctcgaggggctgcagccagtcgacggtcgcatcgacacgacatcgtccgctctctcgggcgccgtggacgagcagttccccgtgtgcaccccgattccagaactgtcagtgcacagcccggacctccaggtcatcacctcgagcactagcaacatcgcctccggacgagtcactgcagtcatgggtgagctacatgcctgtctgagcagtctcgacatgccgttgctcgagtggtcgctgccccatggttccattcgcgatcgcatcaacaccgcgctcaacctgcgacgtctggttcccttgttccccgagacatggaggcgcaacaccggccgcatggttccagcgacggtcggagtgggggatcgcgcaatcgggttcactcggacggccgatcaagaccgtgcgaacacatggtcgatgtcggcactgctgttcgagcagaccgaggacggactcatgatccgtgatcccgatggcaggctctggaccatcgcacaagcgtggagcgtgcccatctccatggtcgccgccgatgcgttcaagatcgggctgcccggctcaccagcccctcggctcaccattgacaatctcgtcgtgttccgtcgtacctggaggtttcccgctggctccatcgacatcatgcacggttcagccgccgagaaacacgctcggctgagggagtggcaggtcacgaatcaccttcctgaccacctcttcgtcaagttcccctccgaacccaagccgatctacttctccttcgagtcccccgccatggccacggtcttcacgcgatcactgcagcgcgacgcccgagagaatccagacagtctcgtgacgatgtccgaagcactgcccgagcctcaatcctcatggctgcacgacacccggagccaccactacgtccacgaattccggctgcaactgaccaaggagcgacatgacgaccacagttgagacacatcccgaaacacgtggcacaaccgcgacatccatctccaatctgatcggtcacacccctctcgtaagaatggaccatctgttcgacggcctccccttcgaggtgtacggcaagctcgagaagctcaatcctggcggaagcatcaaggatcgagcagcacaatccatgatcgaacgggcaattcgacggggtgagatcgtcccgggccgtacgaccgtcatcgagtccagttcgggaaatctcggcatcgccgtggcgatactgtgccaggagcacggcctgaatttcatctgcgtaaccgatgccaaggccacgccaacgaacattcgactcatcgaagcgttcggggccactgttgaggtgatcgaagaacctcatcccgagagtggcgaattcctccccatgaggctcaagagggtaagagaactgctgtcagagattccagatgcatggtggccgaatcagtacgggaaccccgacaatccggcggctcacgagcggactgtccgcgagatcatcgaggcaatcccgcgggttgacacgattgtctgcgcgaccggctcgtgcggaacccttcgcggctgccacgaagcattgcgaaagctgtccccacgcacccgactcgtcgccgtggacgccaagggcagcgccatcttcgacgaggcaggagcaccccatccccgctgtgtcccgggacacggtgcgtcagtgcgaccgccgctgtggcgcgcggggctcgccgaccaactggttctggtctccgacgcggactgcgtcgtgggatgccaggaggccctgcgcaccgaggctcttctcctcggcggatcctcgggagcaattctgacggccattcaccgagtgtctcccacgattcccgctggttccaccgtggtgacgatcctccccgacggcggcgagcgctacatcgacaccatctacagccgctcgtgggtcgactcacacatccccgggctgccctctctcgccgactggggggctcccaaccccgccaattcgtatgacctgaacagaagtgcctcatgaagctctacaccagagagaccgtcgaaactgcgcttgtcgggcgtcatggccaggttctcagtgccgtacagagtgcatacatgctgcattcgacgggagagacatcgctgccattctcaaccttcctccgcccggccgggtatccgaacgatcggatcatcgcacttcccgcccacatcggaggcgacttcgacatagccggtatcaagtggatctcatccttcccggaaaacctcgaccggggccagcaacgagcttcctccgtactcatcctcaatagtctggagacgggatacccgaccgccctgctggagtccagtcagatttcagcaacgcgaacggcagcatcagccgccctggccagcgccaccctccatggctccgaagaccatgtcagcacgattggcatcatcggctgcggaacaatcaatcttgcaacgatcgactacctcttccacgtgcacccccagatcaacgaggtcctctccttcgatctgaggcgggagcgggcccatgagttctcgcacctcgtcaaggcttcgcacccagaggcccgggtccgtgtcgccaaggagcccgacgagattctggccgcaagcaacaccatcgcgatcgccacgaccgactcgagtcattggttggaccttccgccgtggcacgggccggggcaccaagtcgtcctgcacacgtcgctgcgagacctgtcagtgccctcgatcctggcagcggccaacgtcgttgacgatcctgatcacgtctgccgtgaagcgacgtccttggatctggcaactcagcagaccggcaaccgggacttcatcacggggagaatcggagacctccttcttggcgcgccgctgtcctcaagtcctgactcccgtgtcattttctcacccttcgggctcggcatcctcgacctcgcagtcgcctccgtcgtcattgctgccgcctcctcttcagcagtcgagatcaatgggttcgaccccgggaaacacgccacaagcatgattgaggtgaatcgatgaccaccacacagatcaacgacaacacggccgttctgcgcgacgtattccccgccggctccgtcgcattcgtgagcggtgcctcacgcggaattggcgctgcctgcgcgacagcccttgcggccgcgggatgcaacctcgccatcacttatcgaaggaaggagaacgaggcggcacaaatcgccgaatccattgaagccatcgggcgccagtgcatcacaatgcagatggacgtaaccgatgagaaccaagtgaccagagccttccgcatcattcgccagcattacggacgcctggacgccgcggtcttgaactcgggaatcaccagtgacgggcatcttgcaacaatgagccgctccaagtggagctcggtgatcgacacgaatctgaccggaaccttcctctgcacgcgcgaggcgaccaaggccatgtactcgtccggtggctcgatcgtcatggtcgcgtccaccagtggagttgcagggcgaccgggccaggccaactacgcagccagcaagggcggaatcgttgccatgatgaagacgctggccccggaggttgcggcaaagaacgtccgggtgaatgcggtggcacccggcttcattcagaccgacatggtggcggccgttccaaaagcggcactcgcccaggcaatccaacacatccccatgggccgtcttggcctggcacaggaggttgcgtcagccgttaccttcctggcctccccgctcgccgcctacatcacagggaagaccctcactatcgatggcggaatgatcaacggctgaccccaggacccgcacacccccagtaccgagaaagaaacaacaatgaccgagatcacccacactgccaacagcatccgaacccgcgccgaggaacgttccaacaaagcttggcgcctgaaggaggagatcatctccaagctcggtctcgagaccaagccagaatatgtctcggacaaccaaccgctcttcggacgtggccttgagatggattcccttgacactctcgaagtcgtcgtcgccgtcaacaatgagttcggagtctcggtcaacgacgacgacgtacaggcgttcggctcgatcaatgccatggtcgatttcatcgaggtgaacgagaagtgagttctcttgcgctcgaggcgccacccaaggacgcccgtaagaaattcgcctacgacagcgatgccatcaagacgatgctcccacatcgttggccgatgctcatgattgatcgcgcctacgacgtcgtcccagggaaatcgggcaaaggcatcaagtcggtcagcgtcaatgagccgttcttcgccggtcactaccctgaccattccatcatgcccggcgtcatgatcgtcgagtcgatggctcaactcgtggccgtcatctacgtagccgaggccattcagaacaatcccggcatgacgtcgcacgacgcacgttcaagcgttggttatctcggcgcgatccgtcagatgaagttccgacgcctcgtcactccgggcgaccaactcaccctccacgcccagctcggcgagaaagtgggggctctgcgcgaggtttccgtgagagcactcaatggccgggatgtcgtcgcccagggggaactcgtcgtcaccgagcggtgacacccagccacacacgagaaggaagtcccatgatcgttcgcccctacaggccacgtgatgcggaagcgatcgtacatctctacaacagccattccgactcccccaatccagtgtcgggagggattgttgaggaggagttccagagggagctcgaagaacgtggttcgacagtgttcctagtggccgaggaggccggatccattgtcggcacattcgggatgttccgcacgaatggccgacacaccatggccgatgatgaagtcttcgccgacatgttctatgtcaccccgtcacatcgactctcgacagttccgggacagctaatcactgaagccatcagcgagtgcttcatccagggcatcaacgtgatccgcctcaccgtgaaccccgcgaacatctccgcgctcaaggtttacagaaaagtcggttgtgcctgtctcggggccaccgatgcaggcgaggacgggaacattgagctgtacaacttcatccctctggttcttagggcaaccatcaccaaactcgaccacgattgtattcgagccctggcggacatgacttcgttcgcctgcatcaccgagggacgtccacttgatctgtcccacgacttcatcgtggacgctggacggaagatcgtctcccacagcatccagatcgggcgttcaaccatccacgccatggtcgacacgggctcgaggaccattgtggaggccaccctcgacaaccgcgactgggatgctcctcgccagatcgtcgcccccaccccctgtcagaaccggcccgaggaacagcgaggcaaccctgtccggctggtgcacaagaagcttgaggtcaccttcaacgaaggagtcattgagatcagtacgactggccactggggcccggtcctcgcaatgtcctggccctcctccgtctcgcaccgcgctcacgggtggcgacagggccccgccaagtcgtatcgatgcgagcttctcgagaattgcctcgtcctggatgacgaaggaggagtgaaatgcaccatcagcctcaatgattgccaagtcgcgatccggatggatggtgccccaaaaacggaattgagaatgtaccagtggtgcagcctgcgccagggctatctgacggctgacaccggcatcacgagcttcaaccgggcatccagtgggctcggagtcgccgtccgggactcgtccgagattgtcgccgcgggccttcccgtcatccctgacacaccgatcacatggagtgagggtgacatcacggttcagctcgatccctgcggccgcgcctccctgatccactcgaccctggtggaccgaagaatccacttggacgagtctggctcggcaagtctcaccatgaccgtgtttggtgattcccagccccatcgtgccgacaccgtcgagctgcctcccctcgcggcaggcaccgacaggatcgtcctcaagccggctgccggaggcgtgaccacatggcgcttgggcgccaccaaggtgctcaagtcaccgtggccacacgcccgcgcgctcgggcccaatccgatctggcgagccggcctgtgggtcagtcacgagccggatcgccacgaccgtcgccaaggaatggggtggggtcccgatcatcgcagttggaccctgtcggaagacaccatgaccagtactgacgggacactctcctggcgcttcagcggctcccccgacaccggctggacggtcgacgtcacgacgagcaacacgcacggggagaccgtcgtctggctcaccccggactgcccggcgggcgagaggatccgcacgtctgatcatgccgtgacgaccatgcttgacatctcgaagccatggcagcgctggaccacccgatgcgcaattcctctcagacacgggaagtggttcctcatcgagcctgatcatgacctcactgattcccccgaaatcctcatgcgctctgttcacggggtcctgctcgtcggctgtgtcggacgagcccactccggatccgcttcctggcgctttgccatcacgtcagaactccccacctccaacccaagaagaaacgactacacctcagccgcctgaacccaaccagttggaacacccactacagaagaaatggagcaccaccatgtccatcactgagcagtacaagacccttcgcacctcggtcggcctccacacgcctaccggtcccctggtccgtatcaccggtgatgatcgtctcgagtttctcgacaccttcctgtcccgcgcctcggacttcgtggaccccgacaccactcgggagtgcctcgctctcaccgaggacggccttccgctgacgatcttcctccacatcgagcgcgaggaggagtcatggctccttccccgcaccgccatcgatgcggcgaccctcgccacgtacctcggcaacctcgagaccgatggtgacctgtcaatcgagattgctccagagggttggggagctgtcgctgtcgaggggccgctgtcgtggcagatcgccgaaaaccttctcgacttcgacgtggctggcctcgttcttcacgccgtcacggacgtcgtcgttcccggggcccccgagggatcgaaggcatggctcgcccgggtcggaaccactggagagtacggctacctgctcgtctccaacgttcccgacctcgcccgcacttatctcctcagccgcgccacggagctgggcggtcaggcagtcgacgccgatgctctcgcacgagtccaggccgaggccgggatgccctattacgcgatgggcgtgtgccacctcgatgtcgccgggggtgacctcgcctggctcgtggactggcagcgcatcggcgagttccaaggatccgagaatctgcccacacccgtccgagaccagcgccgactggccgccatcgccctgcccaccggcaaccgcccggaagctggtcagaccgtcgctgccggggatgaggagattggaatggtggtgtacgtcaccccgtccgccaatcccgatgaggaactcgcgttcgcacttctggatgctcctttctggactcccacccttccgttgaccgtcggtgcccacgacgggaccacggtcaccctgccccgcgtcgtggcagcctccagcctcaacaagctggggtgacagcgatgacgatcactgctgagaacgccaccacccgcagcgacattgcccggagcattgcggtgaccggcgtgggactggtcacggcacagggtgaccataccgacgagtgctggaccgaacttgtcgatggggtttgcggaatcaccatgaacgtcacgttcgatgactctggcaccacgattccgtgtgctggcgtggctcccattccgaactctgattcgatcgaccgctgttacctgctcggcgtccatgccatgcgtgaagctctcgagatgagtggcatcgacctggactccgtgggtcgtgatcgcatcggactcgtggtgggctcaagcctcggcgcgatgcccaccttggaggcggctcatcgccgggccattgagaccggcgtgctcgatgccggattggcggcagactcccagctccactgcgtcgccgaccacctcgccgctgagttcgacatccgtggaccccgcgtcgtgacatcgaatgcgtgtgccgctggtgccgtggcgatcggctacgccgcagaactcctctggtccgacgatgtggacctggtcgtctgtggcggtgtcgatccactggcccagatctctgccaatgggttcacgtgcctgggagctctcgacaatctcccatgcagcccgatggccggttcctccggtctgactctgggcgagggagccgggttcatggtcctcgagagaacagatgcggcggctgccagaggccaggaggtgatggccgaaatcgccggctacggcacaagttgtgatggttaccaccagactgccccggacccgggtggcaatggcgcccgcagctcaatggaggccgccctgcgctcagctcatctcaagccgtccgacgtcagctacgtcaatctccacggcaccggtactccgaccaacgacgccgtcgagccgaaggcactccggtcattgttcaagtccgatgaccttccccctgtcagttcggtgaagggcgccatcggtcacactctcggcgctgctggcgccatcgaggccgtgtgctcgatcaaggccatccacgagggggtcctgccgccaaccgtcaacaaccgcgggcaggcttcccgaactggtctcgacatcgtgccggagtgcgcacgcaaggccgctcccgacgtggtcatctccaactccttcgccttcgggggcaacaacgcatcagtggtcatcaccgcacctcgaggaggcgttcactgtaccgccccggcgcagcttcgcgaggtcggaatctcaggaatggcagctctggcgggaaaggccgccaactcggaggagcttctttcggccctgtcagaagattgtccaatctggatggccgatgagaagacctgggaaggggatgctgtccaaaccggccatgtggacatcaagcgcctgtcccgcacaatcaacccgtccaaggttcgtcggatggaccccttgggaatcatctccagcgcggtggtgactgatctgtatgcccgacacgggaagctgagccgcaaggatgccgaaagcacgggaatcatcttcgcaaccggctacggtcctgtgacggcggtgacgcagttcaatgacgggatcatccgccacggttccgagggtgccaacgccctggtgttcccgaacaccgtggtcaacgcagccgcaggccacctcgcgatgctgaatcgctaccgtggttacacggccaccttggcatgcggtggaaccagttcactcatggcgctgcttctcgctgctcgcgtcgttggccgcggcgctgcggatcgcatcatggtcgttatcgctgacgagtttcccagcattgccgtccaggccgtcgcgaagcttcctggctaccgacacagggttgatggttccggagccgtgctctcggaaggcgcggtatgcgtcctggtggaggccgtcgaagtcgccgaagcacgcggtaccgcccccatggcgctgctacgcggcttcggatcccgtggagagtccgtgggagtcggtcacaccgcatccgatggacgggcttgggccaaggccatggccgctgcactgggcccggccggcctgactgcctccgacgtgtcgaccgtcgtggcggcatcaagcggacatcctcgcgtcgaccgagccgagcaggcggccaggcggatcgtcggactgtccgcaaccgctacgaccttcccaaaggcgattgtcggagaaacacacggatcggctgccgggatcgggctgttcggtgccctgtgcggttcgaggtcagccgcgcaccagaacatccttgtcaacgccttttcccacggcggtggttatgcctcgatggtggtggagtcactgtgaccacgacgcttctgccacgggttgcccagccgggaccgggcgtcagccatgtcgacaccgaccgtcccatcgagtgcatcatcacccaccacccccacatgccgcgtgatcgcggaggccacgccacctccgtgtcaggcaggtacttgctgcgccaagccgcagaactcatgctcggcacggatcctgcgcattgccccgtcgtcgacccttcgcggcgctggtactggcccggaatcaatcttcacggttctgtctcccatgtcccgggctggagcctgacgacgctgagcaccggcggccacatcggggcagacatccaggacttccgggagcgtcccggcgcaatggcattcatcggtgacctggtcaagctgtcgcgatcggcgtcactccgagaattcgcggagtgcgaggccgtcgtcaaggtgtccgaattgactaaggagacgttcgggcacgtgcgactgcccgaatggacacccggatggcgccacgttttcgaggactactgggtctggagtctcgagatgcacgggatgggagtcatcgcactcgcatccgatctcccccgagccattcgctggtggcggtgcgacgccgatgcccgtggccgtctccaggctctccgacccataagcagtcttggaccaggaaggccgtcatgagccggtactcacgtcgaatctcaggcatcgaacgcggctatctcaacgccgcaacccggggcccgcaccccaccatccacacgatgatcgacttcgagggccgcgtccccgccgactgttggcggcacgcatccacgattgcgtcggccgccaaccctggcatgacagtggtccggaggtcgggccgatggacatccgatccagcgggctgtccggttgtgttccacgactggaccgcggaccccaacgacgttgccgacttccacgctgacatggatctcgtgacgggaccatcgtccacgctccacgttttcgagggggcggaacgcacccgaatcaccttggcagcaagccatgccgtgaccgatgggcggggcatcgaacgatttctcgtcgacctgcttgcagcgttggacgagcgtgaacccattggaagccccgacaccctgaccgatgtcgatatcaaacgatccttggagaacagcatcaagccccgacgccacctggccgctgtgcccgccgatgtcctttctccactgggggggaggaagaaccaacgtatatgggcctccaggacgtggcacagtgccccgggagccatgagcggaagaatcgctgccgctgtggccgagatgatcgaccacgccgcaatgatcatcatcccggttgacatccggcggcacgtcccagaggtccgatccacagcaaacctaagtgcccaactgccagtgatcatcaccccgaaccagcgctggcaaagcatccatgggcatctgctcacggaccttgctcgccatcgagaccttgcgatcatcagtgaggatttccgccacaacaatccgttcgcatcgaccttggaggaaagccaggccatcggcctcgatggtgtctatccctgtgccgcaatcatctccgaccacgggaagctcgacctttcaaggttccagaccttggaactcaccccggtctcgatgcgaagcctcccgatgctcgttccctactccgcaatgttcatcagcagttgcaccgtcggcgagaccaccactgtcaccatcgctcatcgcgctgatgacgatcccgattccataaacaccttcttccaccacatcgaatcccagatgtccatctgagccacgtcgtccctggagagcaaacatgaccacccaaaatgtcatcaccccgccgcgccccgtcacctcccatgccacggcgaccaggtccgaggctccaccgcgaagcgtcatcagagccatggccatctcgatggtcgcgaccctcatggtcatgctcgacacgaccgtcgtgaacgtgtccttgagcgcgaccaccgcccgcttcgggagcatgggcagcgtgcagtgggtcctcacaagttacctacttgcactgtgcgcgacgatgacggcctccgcctgggtcatcgaccgccttggtccacggctcaccttcatcgcctcaatgaccatgttcctcatcggctcggtgatgtgtgcactgagcgattcagtgtggcaactcgtcactggcaggaccatctccggtgccggagctgggatccttgttccgacagcatccgtcctgcttatccgtggcatcccacgcgaacaacttggcagggtgcaggcactgaatgggagtgtccagttgatcgctcccctgatcggcccgactgtgggcggtctcctcgttgacaggtgcgggggctggccggccatctactgggcgaacgtccccgtagctcttgttcttctgattgaggccgtccgcgtcgatccggacgaaccacacaccgctaagcgccgcctcgatgctctcggcctggtctgtggcagcaccgcgatcgtgctgacagtgcttggtgtctcactcttcggcaggacgtcgcgaaacaccaccttcctgcttacgatcggcgcgcttgcagtcctcgcatgggcgttcttcatcacccacatccgaagggctaccaaccctctgcttgacgtttccctgtatcagaaccctgtctattcatggtccagcttcaacgtagcggtgcttggtttcggtctctacgcccccatggtcgtcatgcccctctatctcgaggcgacgcgccacctcactgccgtccacactggtctggtgatgtcagtggccggcgtcggcgtcattatggccggaatcctgtgcacgaagatcatgggccggatcggtggaggcctcacgatgacagttggcataactctgagcatcatcgccactctgcccctggtccggctgacgaaccacacctcctacatactcctggcagtctgcttggccttgcgtggagcaggaatcagcctgacaatcgtcccagccatgacacgggccttcgagtccatcaagaggacggccatggcggacgcctctgcacagctcaacctgttgcagcgaatcggcgggacaattgcgacagcagtcatcatcgcagttatccaccacgaggccatgctcacccgcggactctcccccacagtgttctcgcacgccaacgtgtggatcctcaccgcgaccgccgtcacccttctgccggccttcgcgcttgcgaaggccgaaagacaacagcaggatctctgagcaccgaggagtactccctcgtagaccctcctctgatctaattgggttcgttccaagtgtgtatctcactccggggagccccgattgctgaaccacatcccgttcaccctggcgagtccctcgtggtacgacgtcccctgggcgcccggatctccgtatctcacaggagatatctcggtcctgccagcggactcgccaaggtggacgacgaccatccggggtccttggcaaatccacatgccacctcgtccgacccttccagaggtggggtggaaagtgcatgtgtctgccaagccatcggaattggaatcggttgcctcagtcgtagcactgtggtgcgtacgccacagcgtccccttcaaagtacttcgcacccgaggtctcgttcacgcgagtcaagtcaagtatgcggaccgaagtcagagcggcaaggtctgcacctgctaccccgacggcgagagccttgagcacttctgctccggtcttgccgagctgcttcagaacgtcgattcacctccggtgtccggcgagctgcgagtcggatcctcccctctgtggttgcgtcacgggagtttccgagaggcatgggcggtgtcatccacaggagtaccgttcccggtctacccgggaacaacacatcctgatcgtcgaggccccgcgcccgcagaatccgatcacgacacgccgtggatccggaggctccgtcggacgaatcgccccagcacggttcttcccatcgacgatgtcagactcctccaccgatcaaatgctggcggcgtgtatcaggcaacatggagagacggcacatcggtagtcgtcaaggaggcccggcacctgtccggacttgatgcggcgggtgtcgacgcccgagtgcggctgcgtcacgagtacgaggccctgagaagactggacccctatcgggccgctccccatcccattgatctcattgagaccgaggacggctcgttcctgatcatggaattccttgacggaatgacagtccaccaggagatgtcgaggttccatcctctgattagtaggcgacctcatcggctatcgatgaccgatttttcacgctggtgccgagaggtcgaagatcgcttgaggaatgtcacgagggtcatggccgggtgcggaatcgttcacggggatcttcatcccgcgaatctgatacatgtcggccatgaggttttggttactgactttgaatcctgctcaatcgacggggtcgccgtctcgtcagggatcgccgctccctggttccagtcggacgacacgattcccgatccggcgacgactgacgatctccacactcttctcgtggatccgacttgcggccccgcgcttgtcccccatccaaatcttcgcgcgctcatcagccaggccgcagtcgaggacatgatgggaaatccgactagtttaccacatgcctggaacctcgaggacatgacaagcgaactcgccaaggggatccgggcatcagccactcccgcacgagccgaccgcctctttccctcagacccctacctgttcgggcatccaggttcagaattcggcctgatgcatggcgccgccggaatcatggctgctcttgccgtgactgggtacggtgttgacgcgaatcacgtgacctggatgaaggaccgcttggccacccgcccgaccctgctgccggggttggccaacggaatcgagggaattgccctgggtctctccctgtgcggtcagaacgacatggctgcatccctgctccaccagtccggaattctcacgatcacaacgaacggatcgactgacctcaccctcggtactggtatggcgggccgagcgtgcgcgctgcagtccctctcacaacgactgtcatcgaaatctctcgcccacgctgcatataccctctgggaacaactcgccgtggctgtgcggaacactgatgtggccttgccgaacggcctgttctccggttgggagggaatcgggctctccctgcttgcctctcccctgccggatcgtcatgatctcgcccgccactcactccgactggccctggccacgacaacgattgttgacggtgcgctcttctcaggcgagggacagatccgatggccatatctggggcgtggtcccgcggcatgtggcccgctcgccgccaggcttgatgatgaccagacggccaaggccgtggcacagacctgtcgttgtcccctgactgagtcatccggtctccacaatggccgcgcaggtctcctactcgtcctccgccagctcgtgggagaccaagacgacgccgttcgccgccacctcatgagactgtcgtggtcgatggaccgtcgcgaggaaggcacattgctgctgggtgatcatggcctgcgtttctcatccgatctcgcgacggggtcagccggcgccctcctcgccctgagcagggacccatggcggaacatgacacgaatgctcggaatatgcgatgacacctgtcatggcccactagtgacagtttgatctagcgccgatagttcacaactgaaagactccaaacatcgaggaaaacatgctgagccaaaacgccttggcaggcgtggctcgtttcaccacgatgaacaccaggagacagaatgtccgttgaggccatgcaatccatcgagatggacgaggaaaacagcgccagccagacagtttgcgcttgttacagcttcttctcgtggtcaggatgctgcgtagtctcccaagcggtggaagcatcttgatcgtgtgagacgccgtcgactaccctgtcccccgtggtacgcacacgccccgtcctggacagtcccggaagaccgctcatcgcctccggagtcgtcctggcggtcctgctcatcatcgcggtgatgacgatggtgcttcagcgcgaccccactctcacccccggacgccgcattctcggtatcgtcctgtccacggtccaggccgtcggattcatgtggctgcagacccgcatggttcgtcacggcaagggttcgcgcaacatgcgtgcgacccttggaagggtcggtttctgggccacgtggggactcgtcgcagtgggagtcgtcaatctgtggctgaccaactcgtggaccctcttcggggcctccgtcgccacgcccctccttctcctgccaggggtgtggagtgtggtggccaccctcgtgaccctgatcgtcggtttctccgacctcgtggtcacccacacctcgccactgacctcagccacggtcgtgctggtgaccatcgcggtgtcggtgaacctctacgcattcacgaagctgtcgacggcactcgttgaactccgctcctcccaggaggagatcgcccggctgcgcgtggacgccgagcgtcaccggatatcgcgggacctccacgacatcatcggtcgcaccctggtcgccacgtcgatgcgccagcaggcggccctccacctcgtcgaccgcgacccgcaacgggccaaggaacagctcgacgccgcccatgacgcaatcaccgaggggcagcaccagttgcgttccatcatccaggccgagatgagcaccagcctccccgacgagatcagcgacgccacattcctgtgcgaccgactccacatcgacttccgcatggatgaccgcggcagaccgcacaaacccttcgactcggcggcggcggcggccctgcgcgagggaatcacgaacatgctcaagcacagcgcggcgggctactgccacgtcgccatctccccggacctcctgaccgtcaccaacgacggttgtccgcaatcacctcgcccctccaccacaccgggcaccggaatcgaccatctccggtcccagatcgaggcgctcggtgggtcggtgacgacgtcgcggccctcgcggggcaccttccggctccgctgctccttcccgacccggggggcgtccacgaccacacccgcgaccgaaggaggacgatgacgacgagaatcctcctcgccgaggacatcaaactggtggcagaggccttcgaggcactgctctcggtggaaccggagttcgaggtcgtcgcacgggtggcacgcggcgacgacctggtcacatccgccacccgcctgttccccgacgtgatcctggccgacatcgacatgcccgggatgaccggcatcgaggccacccgaatgcttcgcgacaagggataccgcggcagaatcatcctgctcaccgccctgccgggaagcgggcacctgcacgccgcgatggctgccggagccgacgggtacctgctcaagtcgatcaccgcgccctccctcatcaacgccatccgggcggtgtgcaacggccagtcggccatcgacccgaacgtcgccgcggtcgccatgcgcaagggaccctcgcccctcaacgaccgggaaaccgagattctgcgcctagtcgccgacggttcctccaccgcgcagatcgcctcgcggctgtacctcagcaagggcaccgtcaggaactacctgtcgacggcgatgtcgaagctcgacgccgactcacgcacagcggcggtcacgcgggcacgcgaggagggctggctgtagcaggcgacccgctcagcccaccgcccctcagcccgccgactcctgacgcacggcctcctcgaccgcccggctgagcagggacccggccctgaccatcgacgtctccgggtccggctcgagatcggacaacgcgatgatccggtcgaacgcggaccgtttctcctcgggcaggtcacagcgtccgcacaccgcccagacgggcaccccggcgtcccgggcgatcttgcggatggtgtcgggaagcttgccgagcagggtctgctggtccagccgcccctcccccgtgacgacgagactggaggcggagatccgcgacaccgcgcgggaccatcccaggacgaccgccgcgcccgggcggtacctggtccccaggcacatcagcgcccagccgacccggctgggcggctgcgaaccccctggccaccgcccggcaggcctttcccgaactcagcgaccccttgaaggagtcgacggcaacgatgaccggcgcattcggatcaggacgcatgggatcagcatgtcacgtcgatacggagcagtcgcgccgcctacccctagactcgggggcatggtcaaccgagtctacctgtccctgagcgttctcgccctcgtgctgtgggtggtcgcctaccgtcacatgccgggctgggccgcgggcatcaccctggtgggcatcgtcgtgctgtcgctgtggtgcgagtggtcgcgggtgcgcaccctggccaggatcggcaagtcccgccagcagggcccccgctcctcccgaggacgcaacctgtcgtgagcaatacgattcccgcagccctccaccccggccctgacgaggcc

SEQ ID NO: 425 - DNA, 26620 bp, Propionibacterium acnes
ccttgtggacaccacgtcatccacatgacttgtgtcacatgattcccggaccatcatcaagcagatgctcacccaactgtaatgatttctgttctgaatctggacatgctctgacctgcattcaatgatcaattccgtgcgatattccacaacgcacggggaggtcgcagacaatgacaacagaaagcatccccacgcggctgctcgtgtggcacgagcagaccgatccgaccaagctcctcaggatcaccgacgcgatcaggaggggggatccccttccccccatcgaggccatggcgatcggccacagattcctcgtcctcgacggtgcgcaccgggcccaagcccaccagtactgccatcgatctgagatccgagcccgcctccacaacctccccctcagcgcggaaataccaggctggagccactccataccccgcgatgcagcagcgaaactggctcacctactcctccccgtggacgctctcggtcaggcggaaatcgtcctgcacggggtgcgccgtcaggtggggaccgcttcacaacgaccgcgcgacatctttctcgcctgccaccggatcgcgcgagttgcctacgcgcatggaatcagacctctcggcccggagttctccaacgctccgacgatcgacgccgccaccatgacctggcgcccgccgaacgtgggcacgttgtgggccatcgccagcagtctcggacccctgcccgcaactgtgacccggttcgccccgatcctccggcacgacgccatcggggattccgcgatgacacccgtcacctccgccgcgtgacgacccgcgccaattccgccccaccactggatgaggggcagccgcgtggacgatgctcctgttcaggcagggactccatacgagaccaataggaaaatcatgatcaaaaacacaagccctctgaccgtgaaaaatgtctcgaaaacattccgtggctccagcggagaagccatcaaggccgtgcaagacgtgtcattcaccgttgagcgtggtgaggttgtggcattcctcggcccgaacggcgccgggaagtccaccaccatcgacatggctctcggcctcacccgccccgacagcggccagatcgaggtcttcggtactgacccgctcagcgcggcccggtcgggacgctgcaccgcgatgacacagaccggcgggttgctgcccgacctcacgattgggcagaccatggagatcatctcctcgctctatcgtggctcccacatgaatgcctgcatggagcgagcaaggatcacgcatctggccgatcggcaggtgtcgatgtgctcgggaggcgagcgccaacgacttcgcttcgcactggctctgctgcccgatcctgacttcctcatcctcgacgagcccactgcggggatggatgtggaggcgcgccgggacttctgggcagagatccacgaggacacgcgtcgtggtcggacaattctgttcgcaacgcactacctcgacgaggtggacgagttcgccgatcgggtcatcctcatcaaggagggccgcgtcatcgccgacgacacctccgacgcgatccgcaccatgtcggggggttgcaccgttacggcgaccattcccgacttctccctggcacgactgaatctgccgggcacccaactcatcaagcagggcggcgcacgcgttgatctgcaccatcccgattccgatgccctcgcagcgcgagtcatccagctcggcggcaccgacctgcgcgtggtcccccgcagcctcgacgacgccttcctcgctctcacctcaaccaccaaggagtcctgacatgaccgcccaagcgcttcccgcagtcgccactcccaaggcccgccaccgatccgccatctcgctgaagtacttgtggtgcgagatgcgtcgccccttccggcgttcgacgatgctgttcaacctcgccctccccgcagttctgtacctggccctgttccgcaccgtccacaccgccgagctgccggacgggaacttcgcgatgtggatgatgatcggcatcgctgtctacggagcggccactgcgagcaccagctacgcagcctccatctccgtcgacgaggccaacgggtggacccgcaccatccgcctgacgccgttgtcgtcggtcgggtacgtgctggtgaaggtcctctgcgccatggccatcgccctggccccgaccctgctcatcggtctcatcgggctgttgaccggagctcacggcacgctgcgggtctgggtaatcggactgggggcggcttggctcagctcagcaatcttctccgccttcggcctggctctcggactgtccctgcgtcccgaggtcgtcatgcacgtccccggcctggtcatcaccggtctggcgttcctgggcaacgtcttcgtccccctcagcgggacgatgctcaccattggccgctggagccccgcctacggcatcaccgcgctggctcgttacccgctcaccaacggcatcgacatcgggggcggccacgactccctgacggctgccctcatcggcaccttctgctggttcgccggattcgtgttctgggcctcccgtcgatttaccaagagcacgggtcgtcagtgacagattcggccgatctccggaaggagcagtgttatgaccaagcccctcattgcagtggtcaccgcgggccaaggagcgcagaagcctcgcctgctcacgccatggctcaaggtccccggcgtcacggagaagcttgctgcatggtccgctcaggccgatgtggacctcgtcgagctcggtaccagggcgaatgcagaaaccttggcagcgaccgagaatgcgcagccactactggtctgtctcggagtcctcgtctcggatctcctggccgaccagaacattgtgctcgcaggacactccgtgggcgagctgacagcagcgtgtctcgccggggtagttgatcccgggacggccgtcactcttgcacgacggcgtggactggccatggcgcgggcctgcgctctccacccgaccaccatggcggccatcattggtgacaatccggatgacgtcctccggcggctctcggaactgggactcacggctgccaacatcaacggaggcggacagattgttgcggccggctccaccgacgcgatcgcggaactggtggcgacccctcccaacgggaccgcagtcaagccgttgcgagttgctggcgcctttcacaccaagtacatgacgcctgcgcaggacgctttcgcccaagctgctcaagacgtcaccttctccgacccgcagcacccgatcatctccaacctcgacgggcaggagatccggtccggcaatgacctgcgtgaacggctgattgcccaggtgaccgcgccagttcgatgggatctctgcatccagcagatcgcggatcgtcagccggaactcgccctatcggcccctccggggaaggtgcaggcgtcgctcttgtctcggcagatcccggacctcgcgacggtctgcatcaccacaccacgggaggcagcccaggctgcacagcggatcgaccagtccgtatccgtccttcagggggcatgatgctcatccccgagtacttcctcacagcctgttcggaccatgctgagcgcctggcgatcatcacccacaatgacgttgtgacgtgggccgaactggcgactcgcgtcgacggttttcggcgctggctgcgggaccatggcgtgcaccgccaggacagggtcgttctccagacgccaagcaccgtaggcacggtagccctcatgtgggcctgcctgctcgacggcgtgacgatggtcccggtgcaccaggacctcactgcctcccaggtgcagcaagtcatcgacgactgccgtccagctctggtgtgtggcagcccggacctcgtccaactcctcaactcccccggaatgaagacaagcacacctccaacgcggccggagtcaacgagtattctgccgtccttgtcccgggtcagccccgatgaccttgcgatgctcatctatacgtccggcacgacgggtctcccgaaggggatcatgtgtccccaccggcaggtcgccaccgccgcacggatcgtccatgactgtctcgggtaccgcacggacgacgtcattctctgtcgcctgccgttgtccttcgactacgggctctatcagattctgatgtctgccatctccggtagcgcggttgtcctgcgggacggaggcgcgcaggaccgcaacctggtgcgcgacatcgcccgtcacggcgtcactgtcgttccagtcgtgccgtccatggcgtcaatgctcatcaccctgcagcgtcgtgatcagttgccgaccatcgtcagactgttcacgaataccggggcgcgtctggcacccgagaccgcgaaccagttgctcgcaagcttccccggctcccgctatgcgtcgatgtatggcatgacggagtgcaagcgcatctccatccttccggtggaggagtacgagacgcatccggacagcgtgggaagagctctgcccagcactcacgtcgagatcgttgacgctcagggagttccggttccggcgggcgagcacggggagatcacggtgtccggcccgaccgtgatgaacggctactggcaggtgccgaacagtcccagtggacgattccgacccagcggccacggcctcactctgttcaccggtgatcgcggctggatggatgaggagggacgtctctacctcctcgggcgcgacgacgagatcgtcaagcatcacggcatccgaatcagcctgcaggagatcgagatagccgccgaagccgcgccgggcgtcgacgcagtcatcgctctcaagccggcctccgactcggcccccattgaaatcgcctactgcggcagcacgagtcccgagaacctggcccgccatctcgaaaccgtcctggaccgggcgcgacgaccccaattcatccaccaactccagcagatccccctgacccgtaacgggaaaccaaaccggtcagcagccgccgaggccatccgctcaagggcgtgacggcgaaggccaacacccacagacgaaaggaaaccaccatgacccaggccgagttcaaccagttcatcgagtccacctgctccgcgacgatcgtggatcccgaccgtcctttggtcgatcagggcatcgactccctcggaatgctcaccctcatggtcgctatcgaggacagcctcggcatcgaactggatcccgagtccctcgccgacggtaggggttccacgccctccggtcttctgtcccttgtcgagcagccgaaagcgacggtgtgacgacatgacgacgatggttccttgccgccgtgtggagatgccgcaactgttcgaccacatccccggaagcatctctctctcaggagggctgcccgatctgagcgtgctcccgagcaatcagatcgccgaactgacgtcccggatcatgcgtctcggctcaagaatcctcctgcaatactccaccccttcggtctcgtcctccttggtgccggccatcctggacctggcggaacgaacatgcatgtcaccggatccgcggaatctgatcccgaccgcgggttcccaactgggcctggccatggtgatcaatgcctttgacggcgatgagatcatctgtgactgcgccacctatcccggggcgctggccgccttcgcctctgccggcgtggaaacaacgggggtggccagtgacgaggaggggctcaacccagacgcgctcgctcacgccgtcgcagagggtcgggccaatggccgccgcatcgcagccgtctacaccacgcccaccttccagaatcccaccggctccgtacagtccgagaaccgccgtgcggccctgctcaaggtgtgtgctgacaatgacctcctcctcatcgaggacgatccgtacggcatgctgtccttcgacgggcagacgtggccagctctgaagtccatggacccacagcgcgtcatctacctgggcaccttctcgaaggtgttcgcaccgggcgtccgttccggctggatcgatccgcccgccaatcttgtcgagaaactccgcgctgtgtgcgagatcatgacactctcgccatcagccctcaaccaagcgatcatcggcgagtaccaccgtcgtcacggatgggacgaactgttggagggctatcgcgcctcctaccgcgaccgagcccgtctcctcatcggggctctcgaggctgaactggcaagaacgaattgcactggcacgtggacctggcgtgaaccacggggcggcttctacctgtggttggagaacgtcgccagcaccagcggtatcgacgttgcgcgtcgcgccgccgacaacggagtggccgtggtgcccgggaaacacttcgacgcagccggacacgattcgccgagcctgcgggtgtcgttcagcaattcacgcccggctgatctggtcgaaggagctcgtcgtctcgcccgtgcactggtgggagaggacgttcagaaatgactctcgcgacacgcaccgccaccgacaccctgcagcagaccttgccctggggcacccacgaacgtctcgtcttcgggcgggcgctcctgcgcagcaccggcttcccagccgaaggcttggccctgctcgactccgacgacatcctccccctcctcgactcctttcttgccggggacatcgacagaactcacttcgagaaggaatacaccagtcgcgaggagtccggcgcaagggcgctcatcaacgtcttgaaggacgatgcagtatcgcgcgccatcgcatggcagaaccccaccgcgtggaggtccttcgaatccctgtcgtccacgagcggaatcaatgcttcgactcggcgcaaggtacgccaactcgccctctactggcaacgttactgttccaaggctgagaccattggatacttcggcccgttcgcctgggccgaagtcgacccggaggcctctgcggtcgaattcatctcctccgaccatctgatcgaccgttcccacgtcgcaatggaggcgtgggcggtcattgagatcgggaaagccctggcatcacgggccgaccttcagtggtggatgccaccaatcctgtcccccgccgtcgacctcaacatggagagaggcaccgtgacggtggctggacaccagccacgacgggtccgggaggacgaggcacgagttctcttcctgaccgacggcacccgtcccgccgcccagatcgccaagagcctcgacatggagcccgagcggttgcgcaggatcctcgtggcccatgaacgtcgtcacaccgtgatctgggacgccaacatccctgtctcagtgcacgcgtgggacatcctgcacgaacgcattgcccagatcggagacgctgggctgcgagatgaggccactgctgttctcacgaggttcgacgagcttctggaggtcatccgcaacattcccgacgcccggtccctgacggaggcgacggaatccctgtcccgtcttttcgaaaccgtgacaggaacctcttcgaacagacgtgcgggccaggcatatgcagcccgcagcctgtgctacctggactgcacccgcgccggaaccgccaaggttgggacccggcttctcgaagccctcgacgcccccctcaacctcgtcctacaatccgctgactggttcgcggcgaccttggcaaaggaatacaccaccgaaatcacggacctcgcaaatcgaaagcagcgggcctcccaccagccactgaccatggctgatgtctggccgtccacgatgtcgctgttctggggggactcaccgtccccactgcagcgagccgtgaccgaactgtcacggcggtggagcagagtcctcgaggggctgcagccagtcgacggtcgcatcgacacgacatcgtccgctctctcgggcgccgtggacgagcagttccccgtgtgcaccccgattccagaactgtcagtgcacagcccggacctccaggtcatcacctcgagcactagcaacatcgcctccggacgagtcactgcagtcatgggtgagctacatgcctgtctgagcagtctcgacatgccgttgctcgagtggtcgctgccccatggttccattcgcgatcgcatcaacaccgcgctcaacctgcgacgtctggttcccttgttccccgagacatggaggcgcaacaccggccgcatggttccagcgacggtcggagtgggggatcgcgcaatcgggttcactcggacggccgatcaagaccgtgcgaacacatggtcgatgtcggcactgctgttcgagcagaccgaggacggactcatgatccgtgatcccgatggcaggctctggaccatcgcacaagcgtggagcgtgcccatctccatggtcgccgccgatgcgttcaagatcgggctgcccggctcaccagcccctcggctcaccattgacaatctcgtcgtgttccgtcgtacctggaggtttcccgctggctccatcgacatcatgcacggttcagccgccgagaaacacgctcggctgagggagtggcaggtcacgaatcaccttcctgaccacctcttcgtcaagttcccctccgaacccaagccgatctacttctccttcgagtcccccgccatggccacggtcttcacgcgatcactgcagcgcgacgcccgagagaatccagacagtctcgtgacgatgtccgaagcactgcccgagcctcaatcctcatggctgcacgacacccggagccaccactacgtccacgaattccggctgcaactgaccaaggagcgacatgacgaccacagttgagacacatcccgaaacacgtggcacaaccgcgacatccatctccaatctgatcggtcacacccctctcgtaagaatggaccatctgttcgacggcctccccttcgaggtgtacggcaagctcgagaagctcaatcctggcggaagcatcaaggatcgagcagcacaatccatgatcgaacgggcaattcgacggggtgagatcgtcccgggccgtacgaccgtcatcgagtccagttcgggaaatctcggcatcgccgtggcgatactgtgccaggagcacggcctgaatttcatctgcgtaaccgatgccaaggccacgccaacgaacattcgactcatcgaagcgttcggggccactgttgaggtgatcgaagaacctcatcccgagagtggcgaattcctccccatgaggctcaagagggtaagagaactgctgtcagagattccagatgcatggtggccgaatcagtacgggaaccccgacaatccggcggctcacgagcggactgtccgcgagatcatcgaggcaatcccgcgggttgacacgattgtctgcgcgaccggctcgtgcggaacccttcgcggctgccacgaagcattgcgaaagctgtccccacgcacccgactcgtcgccgtggacgccaagggcagcgccatcttcgacgaggcaggagcaccccatccccgctgtgtcccgggacacggtgcgtcagtgcgaccgccgctgtggcgcgcggggctcgccgaccaactggttctggtctccgacgcggactgcgtcgtgggatgccaggaggccctgcgcaccgaggctcttctcctcggcggatcctcgggagcaattctgacggccattcaccgagtgtctcccacgattcccgctggttccaccgtggtgacgatcctccccgacggcggcgagcgctacatcgacaccatctacagccgctcgtgggtcgactcacacatccccgggctgccctctctcgccgactggggggctcccaaccccgccaattcgtatgacctgaacagaagtgcctcatgaagctctacaccagagagaccgtcgaaactgcgcttgtcgggcgtcatggccaggttctcagtgccgtacagagtgcatacatgctgcattcgacgggagagacatcgctgccattctcaaccttcctccgcccggccgggtatccgaacgatcggatcatcgcacttcccgcccacatcggaggcgacttcgacatagccggtatcaagtggatctcatccttcccggaaaacctcgaccggggccagcaacgagcttcctccgtactcatcctcaatagtctggagacgggatacccgaccgccctgctggagtccagtcagatttcagcaacgcgaacggcagcatcagccgccctggccagcgccaccctccatggctccgaagaccatgtcagcacgattggcatcatcggctgcggaacaatcaatcttgcaacgatcgactacctcttccacgtgcacccccagatcaacgaggtcctctccttcgatctgaggcgggagcgggcccatgagttctcgcacctcgtcaaggcttcgcacccagaggcccgggtccgtgtcgccaaggagcccgacgagattctggccgcaagcaacaccatcgcgatcgccacgaccgactcgagtcattggttggaccttccgccgtggcacgggccggggcaccaagtcgtcctgcacacgtcgctgcgagacctgtcagtgccctcgatcctggcagcggccaacgtcgttgacgatcctgatcacgtctgccgtgaagcgacgtccttggatctggcaactcagcagaccggcaaccgggacttcatcacggggagaatcggagacctccttcttggcgcgccgctgtcctcaagtcctgactcccgtgtcattttctcacccttcgggctcggcatcctcgacctcgcagtcgcctccgtcgtcattgctgccgcctcctcttcagcagtcgagatcaatgggttcgaccccgggaaacacgccacaagcatgattgaggtgaatcgatgaccaccacacagatcaacgacaacacggccgttctgcgcgacgtattccccgccggctccgtcgcattcgtgagcggtgcctcacgcggaattggcgctgcctgcgcgacagcccttgcggccgcgggatgcaacctcgccatcacttatcgaaggaaggagaacgaggcggcacaaatcgccgaatccattgaagccatcgggcgccagtgcatcacaatgcagatggacgtaaccgatgagaaccaagtgaccagagccttccgcatcattcgccagcattacggacgcctggacgccgcggtcttgaactcgggaatcaccagtgacgggcatcttgcaacaatgagccgctccaagtggagctcggtgatcgacacgaatctgaccggaaccttcctctgcacgcgcgaggcgaccaaggccatgtactcgtccggtggctcgatcgtcatggtcgcgtccaccagtggagttgcagggcgaccgggccaggccaactacgcagccagcaagggcggaatcgttgccatgatgaagacgctggccccggaggttgcggcaaagaacgtccgggtgaatgcggtggcacccggcttcattcagaccgacatggtggcggccgttccaaaagcggcactcgcccaggcaatccaacacatccccatgggccgtcttggcctggcacaggaggttgcgtcagccgttaccttcctggcctccccgctcgccgcctacatcacagggaagaccctcactatcgatggcggaatgatcaacggctgaccccaggacccgcacacccccagtaccgagaaagaaacaacaatgaccgagatcacccacactgccaacagcatccgaacccgcgccgaggaacgttccaacaaagcttggcgcctgaaggaggagatcatctccaagctcggtctcgagaccaagccagaatatgtctcggacaaccaaccgctcttcggacgtggccttgagatggattcccttgacactctcgaagtcgtcgtcgccgtcaacaatgagttcggagtctcggtcaacgacgacgacgtacaggcgttcggctcgatcaatgccatggtcgatttcatcgaggtgaacgagaagtgagttctcttgcgctcgaggcgccacccaaggacgcccgtaagaaattcgcctacgacagcgatgccatcaagacgatgctcccacatcgttggccgatgctcatgattgatcgcgcctacgacgtcgtcccagggaaatcgggcaaaggcatcaagtcggtcagcgtcaatgagccgttcttcgccggtcactaccctgaccattccatcatgcccggcgtcatgatcgtcgagtcgatggctcaactcgtggccgtcatctacgtagccgaggccattcagaacaatcccggcatgacgtcgcacgacgcacgttcaagcgttggttatctcggcgcgatccgtcagatgaagttccgacgcctcgtcactccgggcgaccaactcaccctccacgcccagctcggcgagaaagtgggggctctgcgcgaggtttccgtgagagcactcaatggccgggatgtcgtcgcccagggggaactcgtcgtcaccgagcggtgacacccagccacacacgagaaggaagtcccatgatcgttcgcccctacaggccacgtgatgcggaagcgatcgtacatctctacaacagccattccgactcccccaatccagtgtcgggagggattgttgaggaggagttccagagggagctcgaagaacgtggttcgacagtgttcctagtggccgaggaggccggatccattgtcggcacattcgggatgttccgcacgaatggccgacacaccatggccgatgatgaagtcttcgccgacatgttctatgtcaccccgtcacatcgactctcgacagttccgggacagctaatcactgaagccatcagcgagtgcttcatccagggcatcaacgtgatccgcctcaccgtgaaccccgcgaacatctccgcgctcaaggtttacagaaaagtcggttgtgcctgtctcggggccaccgatgcaggcgaggacgggaacattgagctgtacaacttcatccctctggttcttagggcaaccatcaccaaactcgaccacgattgtattcgagccctggcggacatgacttcgttcgcctgcatcaccgagggacgtccacttgatctgtcccacgacttcatcgtggacgctggacggaagatcgtctcccacagcatccagatcgggcgttcaaccatccacgccatggtcgacacgggctcgaggaccattgtggaggccaccctcgacaaccgcgactgggatgctcctcgccagatcgtcgcccccaccccctgtcagaaccggcccgaggaacagcgaggcaaccctgtccggctggtgcacaagaagcttgaggtcaccttcaacgaaggagtcattgagatcagtacgactggccactggggcccggtcctcgcaatgtcctggccctcctccgtctcgcaccgcgctcacgggtggcgacagggccccgccaagtcgtatcgatgcgagcttctcgagaattgcctcgtcctggatgacgaaggaggagtgaaatgcaccatcagcctcaatgattgccaagtcgcgatccggatggatggtgccccaaaaacggaattgagaatgtaccagtggtgcagcctgcgccagggctatctgacggctgacaccggcatcacgagcttcaaccgggcatccagtgggctcggagtcgccgtccgggactcgtccgagattgtcgccgcgggccttcccgtcatccctgacacaccgatcacatggagtgagggtgacatcacggttcagctcgatccctgcggccgcgcctccctgatccactcgaccctggtggaccgaagaatccacttggacgagtctggctcggcaagtctcaccatgaccgtgtttggtgattcccagccccatcgtgccgacaccgtcgagctgcctcccctcgcggcaggcaccgacaggatcgtcctcaagccggctgccggaggcgtgaccacatggcgcttgggcgccaccaaggtgctcaagtcaccgtggccacacgcccgcgcgctcgggcccaatccgatctggcgagccggcctgtgggtcagtcacgagccggatcgccacgaccgtcgccaaggaatggggtggggtcccgatcatcgcagttggaccctgtcggaagacaccatgaccagtactgacgggacactctcctggcgcttcagcggctcccccgacaccggctggacggtcgacgtcacgacgagcaacacgcacggggagaccgtcgtctggctcaccccggactgcccggcgggcgagaggatccgcacgtctgatcatgccgtgacgaccatgcttgacatctcgaagccatggcagcgctggaccacccgatgcgcaattcctctcagacacgggaagtggttcctcatcgagcctgatcatgacctcactgattcccccgaaatcctcatgcgctctgttcacggggtcctgctcgtcggctgtgtcggacgagcccactccggatccgcttcctggcgctttgccatcacgtcagaactccccacctccaacccaagaagaaacgactacacctcagccgcctgaacccaaccagttggaacacccactacagaagaaatggagcaccaccatgtccatcactgagcagtacaagacccttcgcacctcggtcggcctccacacgcctaccggtcccctggtccgtatcaccggtgatgatcgtctcgagtttctcgacaccttcctgtcccgcgcctcggacttcgtggaccccgacaccactcgggagtgcctcgctctcaccgaggacggccttccgctgacgatcttcctccacatcgagcgcgaggaggagtcatggctccttccccgcaccgccatcgatgcggcgaccctcgccacgtacctcggcaacctcgagaccgatggtgacctgtcaatcgagattgctccagagggttggggagctgtcgctgtcgaggggccgctgtcgtggcagatcgccgaaaaccttctcgacttcgacgtggctggcctcgttcttcacgccgtcacggacgtcgtcgttcccggggcccccgagggatcgaaggcatggctcgcccgggtcggaaccactggagagtacggctacctgctcgtctccaacgttcccgacctcgcccgcacttatctcctcagccgcgccacggagctgggcggtcaggcagtcgacgccgatgctctcgcacgagtccaggccgaggccgggatgccctattacgcgatgggcgtgtgccacctcgatgtcgccgggggtgacctcgcctggctcgtggactggcagcgcatcggcgagttccaaggatccgagaatctgcccacacccgtccgagaccagcgccgactggccgccatcgccctgcccaccggcaaccgcccggaagctggtcagaccgtcgctgccggggatgaggagattggaatggtggtgtacgtcaccccgtccgccaatcccgatgaggaactcgcgttcgcacttctggatgctcctttctggactcccacccttccgttgaccgtcggtgcccacgacgggaccacggtcaccctgccccgcgtcgtggcagcctccagcctcaacaagctggggtgacagcgatgacgatcactgctgagaacgccaccacccgcagcgacattgcccggagcattgcggtgaccggcgtgggactggtcacggcacagggtgaccataccgacgagtgctggaccgaacttgtcgatggggtttgcggaatcaccatgaacgtcacgttcgatgactctggcaccacgattccgtgtgctggcgtggctcccattccgaactctgattcgatcgaccgctgttacctgctcggcgtccatgccatgcgtgaagctctcgagatgagtggcatcgacctggactccgtgggtcgtgatcgcatcggactcgtggtgggctcaagcctcggcgcgatgcccaccttggaggcggctcatcgccgggccattgagaccggcgtgctcgatgccggattggcggcagactcccagctccactgcgtcgccgaccacctcgccgctgagttcgacatccgtggaccccgcgtcgtgacatcgaatgcgtgtgccgctggtgccgtggcgatcggctacgccgcagaactcctctggtccgacgatgtggacctggtcgtctgtggcggtgtcgatccactggcccagatctctgccaatgggttcacgtgcctgggagctctcgacaatctcccatgcagcccgatggccggttcctccggtctgactctgggcgagggagccgggttcatggtcctcgagagaacagatgcggcggctgccagaggccaggaggtgatggccgaaatcgccggctacggcacaagttgtgatggttaccaccagactgccccggacccgggtggcaatggcgcccgcagctcaatggaggccgccctgcgctcagctcatctcaagccgtccgacgtcagctacgtcaatctccacggcaccggtactccgaccaacgacgccgtcgagccgaaggcactccggtcattgttcaagtccgatgaccttccccctgtcagttcggtgaagggcgccatcggtcacactctcggcgctgctggcgccatcgaggccgtgtgctcgatcaaggccatccacgagggggtcctgccgccaaccgtcaacaaccgcgggcaggcttcccgaactggtctcgacatcgtgccggagtgcgcacgcaaggccgctcccgacgtggtcatctccaactccttcgccttcgggggcaacaacgcatcagtggtcatcaccgcacctcgaggaggcgttcactgtaccgccccggcgcagcttcgcgaggtcggaatctcaggaatggcagctctggcgggaaaggccgccaactcggaggagcttctttcggccctgtcagaagattgtccaatctggatggccgatgagaagacctgggaaggggatgctgtccaaaccggccatgtggacatcaagcgcctgtcccgcacaatcaacccgtccaaggttcgtcggatggaccccttgggaatcatctccagcgcggtggtgactgatctgtatgcccgacacgggaagctgagccgcaaggatgccgaaagcacgggaatcatcttcgcaaccggctacggtcctgtgacggcggtgacgcagttcaatgacgggatcatccgccacggttccgagggtgccaacgccctggtgttcccgaacaccgtggtcaacgcagccgcaggccacctcgcgatgctgaatcgctaccgtggttacacggccaccttggcatgcggtggaaccagttcactcatggcgctgcttctcgctgctcgcgtcgttggccgcggcgctgcggatcgcatcatggtcgttatcgctgacgagtttcccagcattgccgtccaggccgtcgcgaagcttcctggctaccgacacagggttgatggttccggagccgtgctctcggaaggcgcggtatgcgtcctggtggaggccgtcgaagtcgccgaagcacgcggtaccgcccccatggcgctgctacgcggcttcggatcccgtggagagtccgtgggagtcggtcacaccgcatccgatggacgggcttgggccaaggccatggccgctgcactgggcccggccggcctgactgcctccgacgtgtcgaccgtcgtggcggcatcaagcggacatcctcgcgtcgaccgagccgagcaggcggccaggcggatcgtcggactgtccgcaaccgctacgaccttcccaaaggcgattgtcggagaaacacacggatcggctgccgggatcgggctgttcggtgccctgtgcggttcgaggtcagccgcgcaccagaacatccttgtcaacgccttttcccacggcggtggttatgcctcgatggtggtggagtcactgtgaccacgacgcttctgccacgggttgcccagccgggaccgggcgtcagccatgtcgacaccgaccgtcccatcgagtgcatcatcacccaccacccccacatgccgcgtgatcgcggaggccacgccacctccgtgtcaggcaggtacttgctgcgccaagccgcagaactcatgctcggcacggatcctgcgcattgccccgtcgtcgacccttcgcggcgctggtactggcccggaatcaatcttcacggttctgtctcccatgtcccgggctggagcctgacgacgctgagcaccggcggccacatcggggcagacatccaggacttccgggagcgtcccggcgcaatggcattcatcggtgacctggtcaagctgtcgcgatcggcgtcactccgagaattcgcggagtgcgaggccgtcgtcaaggtgtccgaattgactaaggagacgttcgggcacgtgcgactgcccgaatggacacccggatggcgccacgttttcgaggactactgggtctggagtctcgagatgcacgggatgggagtcatcgcactcgcatccgatctcccccgagccattcgctggtggcggtgcgacgccgatgcccgtggccgtctccaggctctccgacccataagcagtcttggaccaggaaggccgtcatgagccggtactcacgtcgaatctcaggcatcgaacgcggctatctcaacgccgcaacccggggcccgcaccccaccatccacacgatgatcgacttcgagggccgcgtccccgccgactgttggcggcacgcatccacgattgcgtcggccgccaaccctggcatgacagtggtccggaggtcgggccgatggacatccgatccagcgggctgtccggttgtgttccacgactggaccgcggaccccaacgacgttgccgacttccacgctgacatggatctcgtgacgggaccatcgtccacgctccacgttttcgagggggcggaacgcacccgaatcaccttggcagcaagccatgccgtgaccgatgggcggggcatcgaacgatttctcgtcgacctgcttgcagcgttggacgagcgtgaacccattggaagccccgacaccctgaccgatgtcgatatcaaacgatccttggagaacagcatcaagccccgacgccacctggccgctgtgcccgccgatgtcctttctccactgggggggaggaagaaccaacgtatatgggcctccaggacgtggcacagtgccccgggagccatgagcggaagaatcgctgccgctgtggccgagatgatcgaccacgccgcaatgatcatcatcccggttgacatccggcggcacgtcccagaggtccgatccacagcaaacctaagtgcccaactgccagtgatcatcaccccgaaccagcgctggcaaagcatccatgggcatctgctcacggaccttgctcgccatcgagaccttgcgatcatcagtgaggatttccgccacaacaatccgttcgcatcgaccttggaggaaagccaggccatcggcctcgatggtgtctatccctgtgccgcaatcatctccgaccacgggaagctcgacctttcaaggttccagaccttggaactcaccccggtctcgatgcgaagcctcccgatgctcgttccctactccgcaatgttcatcagcagttgcaccgtcggcgagaccaccactgtcaccatcgctcatcgcgctgatgacgatcccgattccataaacaccttcttccaccacatcgaatcccagatgtccatctgagccacgtcgtccctggagagcaaacatgaccacccaaaatgtcatcaccccgccgcgccccgtcacctcccatgccacggcgaccaggtccgaggctccaccgcgaagcgtcatcagagccatggccatctcgatggtcgcgaccctcatggtcatgctcgacacgaccgtcgtgaacgtgtccttgagcgcgaccaccgcccgcttcgggagcatgggcagcgtgcagtgggtcctcacaagttacctacttgcactgtgcgcgacgatgacggcctccgcctgggtcatcgaccgccttggtccacggctcaccttcatcgcctcaatgaccatgttcctcatcggctcggtgatgtgtgcactgagcgattcagtgtggcaactcgtcactggcaggaccatctccggtgccggagctgggatccttgttccgacagcatccgtcctgcttatccgtggcatcccacgcgaacaacttggcagggtgcaggcactgaatgggagtgtccagttgatcgctcccctgatcggcccgactgtgggcggtctcctcgttgacaggtgcgggggctggccggccatctactgggcgaacgtccccgtagctcttgttcttctgattgaggccgtccgcgtcgatccggacgaaccacacaccgctaagcgccgcctcgatgctctcggcctggtctgtggcagcaccgcgatcgtgctgacagtgcttggtgtctcactcttcggcaggacgtcgcgaaacaccaccttcctgcttacgatcggcgcgcttgcagtcctcgcatgggcgttcttcatcacccacatccgaagggctaccaaccctctgcttgacgtttccctgtatcagaaccctgtctattcatggtccagcttcaacgtagcggtgcttggtttcggtctctacgcccccatggtcgtcatgcccctctatctcgaggcgacgcgccacctcactgccgtccacactggtctggtgatgtcagtggccggcgtcggcgtcattatggccggaatcctgtgcacgaagatcatgggccggatcggtggaggcctcacgatgacagttggcataactctgagcatcatcgccactctgcccctggtccggctgacgaaccacacctcctacatactcctggcagtctgcttggccttgcgtggagcaggaatcagcctgacaatcgtcccagccatgacacgggccttcgagtccatcaagaggacggccatggcggacgcctctgcacagctcaacctgttgcagcgaatcggcgggacaattgcgacagcagtcatcatcgcagttatccaccacgaggccatgctcacccgcggactctcccccacagtgttctcgcacgccaacgtgtggatcctcaccgcgaccgccgtcacccttctgccggccttcgcgcttgcgaaggccgaaagacaacagcaggatctctgagcaccgaggagtactccctcgtagaccctcctctgatctaattgggttcgttccaagtgtgtatctcactccggggagccccgattgctgaaccacatcccgttcaccctggcgagtccctcgtggtacgacgtcccctgggcgcccggatctccgtatctcacaggagatatctcggtcctgccagcggactcgccaaggtggacgacgaccatccggggtccttggcaaatccacatgccacctcgtccgacccttccagaggtggggtggaaagtgcatgtgtctgccaagccatcggaattggaatcggttgcctcagtcgtagcactgtggtgcgtacgccacagcgtccccttcaaagtacttcgcacccgaggtctcgttcacgcgagtcaagtcaagtatgcggaccgaagtcagagcggcaaggtctgcacctgctaccccgacggcgagagccttgagcacttctgctccggtcttgccgagctgcttcagaacgtcgattcacctccggtgtccggcgagctgcgagtcggatcctcccctctgtggttgcgtcacgggagtttccgagaggcatgggcggtgtcatccacaggagtaccgttcccggtctacccgggaacaacacatcctgatcgtcgaggccccgcgcccgcagaatccgatcacgacacgccgtggatccggaggctccgtcggacgaatcgccccagcacggttcttcccatcgacgatgtcagactcctccaccgatcaaatgctggcggcgtgtatcaggcaacatggagagacggcacatcggtagtcgtcaaggaggcccggcacctgtccggacttgatgcggcgggtgtcgacgcccgagtgcggctgcgtcacgagtacgaggccctgagaagactggacccctatcgggccgctccccatcccattgatctcattgagaccgaggacggctcgttcctgatcatggaattccttgacggaatgacagtccaccaggagatgtcgaggttccatcctctgattagtaggcgacctcatcggctatcgatgaccgatttttcacgctggtgccgagaggtcgaagatcgcttgaggaatgtcacgagggtcatggccgggtgcggaatcgttcacggggatcttcatcccgcgaatctgatacatgtcggccatgaggttttggttactgactttgaatcctgctcaatcgacggggtcgccgtctcgtcagggatcgccgctccctggttccagtcggacgacacgattcccgatccggcgacgactgacgatctccacactcttctcgtggatccgacttgcggccccgcgcttgtcccccatccaaatcttcgcgcgctcatcagccaggccgcagtcgaggacatgatgggaaatccgactggtttaccacatgcctggaacctcgaggacatgacaagcgaactcgccaaggggatccgggcatcagccactcccgcacgagccgaccgcctctttccctcagacccctacctgttcgggcatccaggttcagaattcggcctgatgcatggcgccgccggaatcatggctgctcttgccgtgactgggtacggtgttgacgcgaatcacgtgacctggatgaaggaccgcttggccacccgcccgaccctgctgccggggttggccaacggaatcgagggaattgccctgggtctctccctgtgcggtcagaacgacatggctgcatccctgctccaccagtccggaattctcacgatcacaacgaacggatcgactgacctcaccctcggtactggtatggcgggccgagcgtgcgcgctgcagtccctctcacaacgactgtcatcgaaatctctcgcccacgctgcatataccctctgggaacaactcgccgtggctatgcggaacactgatgtggccttgccgaacggcctgttctccggttgggagggaatcgggctctccctgcttgcctctcccctgccggatcgtcatgatctcgcccgccactcactccgactggccctggccacgacaacgattgttgacggtgcgctcttctcaggcgagggacagatccgatggccatatctggggcgtggtcccgcggcatgtggcccgctcgccgccaggcttgatgatgaccagacggccaaggccgtggcacagacctgtcgttgtcccctgactgagtcatccggtctccacaatggccgcgcaggtctcctactcgtcctccgccagctcgtgggagaccaagacgacgccgttcgccgccacctcatgagactgtcgtggtcgatggaccgtcgcgaggaaggcacattgctgctgggtgatcatggcctgcgtttctcatccgatctcgcgacggggtcagccggcgccctcctcgccctgagcagggacccatggcggaacatgacacgaatgctcggaatatgcgatgacacctgtcatggcccactagtgacagtttgatctagcgccgatagttcacaactgaaagactccaaacatcgaggaaaacatgctgagccaaaacgccttggcaggcgtggctcgtttcaccacgatgaacaccaggagacagaatgtccgttgaggccatgcaatccatcgagatggacgaggaaaacagcgccagccagacagtttgcgcttgttacagcttcttctcgtggtcaggatgctgcgtagtctcccaagcggtggaagcatcttgatcgtgtgagacaccgtcgactaccctgtcccccgtggtacgcacacgccccgtcctggacagtcccggaagaccgctcatcgcctccggagtcgtcctggcggtcctgctcatcatcgcggtgatgacgatggtgcttcagcgcgaccccactctcacccccggacgccgcattctcggtatcgtcctgtccacggtccaggccgtcggattcatgtggctgcagacccgcatggttcgtcacggcaagggttcgcgcaacatgcgtgcgacccttggaagggtcggtttctgggccacgtggggactcgtcgcagtgggagtcgtcaatctgtggctgaccaactcgtggaccctcttcggggcctccgtcgccacgcccctccttctcctgccaggggtgtggagtgtggtggccaccctcgtgaccctgatcgtcggtttctccgacctcgtggtcacccacacctcgccactgacctcagccacggtcgtgctggtgaccatcgcggtgtcggtgaacctctacgcattcacgaagctgtcgacggcactcgttgaactccgctcctcccaggaggagatcgcccggctgcgcgtggacgccgagcgtcaccggatatcgcgggacctccacgacatcatcggtcgcaccctggtcgccacgtcgatgcgccagcaggcggccctccacctcgtcgaccgcgacccgcaacgggccaaggaacagctcgacgccgcccatgacgcaatcaccgaggggcagcaccagttgcgttccatcatccaggccgagatgagcaccagcctccccgacgagatcagcgacgccacattcctgtgcgaccgactccacatcgacttccgcatggatgaccgcggcagaccgcacaaacccttcgactcggcggcggcggcggccctgcgcgagggaatcacgaacatgctcaagcacagcgcggcgggctactgccacgtcgccatctccccggacctcctgaccgtcaccaacgacggttgtccgcaatcacctcgcccctccaccacaccgggcaccggaatcgaccatctccggtcccagatcgaggcgctcggtgggtcggtgacgacgtcgcggccctcgcggggcaccttccggctccgctgctccttcccgacccggggggcgtccacgaccacacccgcgaccgaaggaggacgatgacgacgagaatcctcctcgccgaggacatcaaactggtggcagaggccttcgaggcactgctctcggtggaaccggagttcgaggtcgtcgcacgggtggcacgcggcgacgacctggtcacatccgccacccgcctgttccccgacgtgatcctggccgacatcgacatgcccgggatgaccggcatcgaggccacccgaatgcttcgcgacaagggataccgcggcagaatcatcctgctcaccgccctgccgggaagcgggcacctgcacgccgcgatggctgccggagccgacgggtacctgctcaagtcgatcaccgcgccctccctcatcaacgccatccgggcggtgtgcaacggccagtcggccatcgacccgaacgtcgccgcggtcgccatgcgcaagggaccctcgcccctcaacgaccgggaaaccgagattctgcgcctagtcgccgacggttcctccaccgcgcagatcgcctcgcggctgtacctcagcaagggcaccgtcaggaactacctgtcgacggcgatgtcgaagctcgacgccgactcacgcacagcggcggtcacgcgggcacgcgaggagggctggctgtagcaggcgacccgctcagcccaccgcccctcagcccgccgactcctgacgcacggcctcctcgaccgcccggctgagcagggacccggccctgaccatcgacgtctccgggtccggctcgagatcggacaacgcgatgatccggtcgaacgcggaccgtttctcctcgggcaggtcacagcgtccgcacaccgcccagacgggcaccccggcgtcccgggcgatcttgcggatggtgtcgggaagcttgccgagcagggtctgctggtccagccgcccctcccccgtgacgacgagactggaggcggagatccgcgacaccgcgcgggaccatcccaggacgaccgccgcgcccgggcggtacctggtccccaggcacatcagcgcccagccgacccggctgggcggctgcgaaccccctggccaccgcccggcaggcctttcccgaactcagcgaccccttgaaggagtcgacggcaacgatgaccggcgcattcggatcaggacgcatgggatcagcatgtcacgtcgatacggagcagtcgcgccgcctacccctagactcgggggcatggtcaaccgagtctacctgtccctgagcgttctcgccctcgtgctgtgggtggtcgcctaccgtcacatgccgggctgggccgcgggcatcaccctggtgggcatcgtcgtgctgtcgctgtggtgcgagtggtcgcgggtgcgcaccctggccaggatcggcaagtcccgccagcagggcccccgctcctcccgaggacgcaacctgtcgtgagcaatacgattcccgcagccctccaccccggccctgacgaggcc

SEQ ID NO: 426 - DNA, 26620 bp, Propionibacterium acnes
ccttgtggacaccacgtcatccacatgacttgtgtcacatgattcccggaccatcatcaagcagatgctcacccaactgtaatgatttctgttctgaatctggacatgctctgacctgcattcaatgatcaattccgtgcgatattccacaacgcacggggaggtcgcagacaatgacaacagaaagcatccccacgcggctgctcgtgtggcacgagcagaccgatccgaccaagctcctcaggatcaccgacgcgatcaggaggggggatccccttccccccatcgaggccatggcgatcggccacagattcctcgtcctcgacggtgcgcaccgggcccaagcccaccagtactgccatcgatctgagatccgagcccgcctccacaacctccccctcagcgcggaaataccaggctggagccactccataccccgcgatgcagcagcgaaactggctcacctactcctccccgtggacgctctcggtcaggcggaaatcgtcctgcacggggtgcgccgtcaggtggggaccgcttcacaacgaccgcgcgacatctttctcgcctgccaccggatcgcgcgagttgcctacgcgcatggaatcagacctctcggcccggagttctccaacgctccgacgatcgacgccgccaccatgacctggcgcccgccgaacgtgggcacgttgtgggccatcgccagcagtctcggacccctgcccgcaactgtgacccggttcgccccgatcctccggcacgacgccatcggggattccgcgatgacacccgtcacctccgccgcgtgacgacccgcgccaattccgccccaccactggatgaggggcagccgcgtggacgatgctcctgttcaggcagggactccatacgagaccaataggaaaatcatgatcaaaaacacaagccctctgaccgtgaaaaatgtctcgaaaacattccgtggctccagcggagaagccatcaaggccgtgcaagacgtgtcattcaccgttgagcgtggtgaggttgtggcattcctcggcccgaacggcgccgggaagtccaccaccatcgacatggctctcggcctcacccgccccgacagcggccagatcgaggtcttcggtactgacccgctcagcgcggcccggtcgggacgctgcaccgcgatgacacagaccggcgggttgctgcccgacctcacgattgggcagaccatggagatcatctcctcgctctatcgtggctcccacatgaatgcctgcatggagcgagcaaggatcacgcatctggccgatcggcaggtgtcgatgtgctcgggaggcgagcgccaacgacttcgcttcgcactggctctgctgcccgatcctgacttcctcatcctcgacgagcccactgcggggatggatgtggaggcgcgccgggacttctgggcagagatccacgaggacacgcgtcgtggtcggacaattctgttcgcaacgcactacctcgacgaggtggacgagttcgccgatcgggtcatcctcatcaaggagggccgcgtcatcgccgacgacacctccgacgcgatccgcaccatgtcggggggttgcaccgttacggcgaccattcccgacttctccctggcacgactgaatctgccgggcacccaactcatcaagcagggcggcgcacgcgttgatctgcaccatcccgattccgatgccctcgcagcgcgagtcatccagctcggcggcaccgacctgcgcgtggtcccccgcagcctcgacgacgccttcctcgctctcacctcaaccaccaaggagtcctgacatgaccgcccaagcgcttcccgcagtcgccactcccaaggcccgccaccgatccgccatctcgctgaagtacttgtggtgcgagatgcgtcgccccttccggcgttcgacgatgctgttcaacctcgccctccccgcagttctgtacctggccctgttccgcaccgtccacaccgccgagctgccggacgggaacttcgcgatgtggatgatgatcggcatcgctgtctacggagcggccactgcgagcaccagctacgcagcctccatctccgtcgacgaggccaacgggtggacccgcaccatccgcctgacgccgttgtcgtcggtcgggtacgtgctggtgaaggtcctctgcgccatggccatcgccctggccccgaccctgctcatcggtctcatcgggctgttgaccggagctcacggcacgctgcgggtctgggtaatcggactgggggcggcttggctcagctcagcaatcttctccgccttcggcctggctctcggactgtccctgcgtcccgaggtcgtcatgcacgtccccggcctggtcatcaccggtctggcgttcctgggcaacgtcttcgtccccctcagcgggacgatgctcaccattggccgctggagccccgcctacggcatcaccgcgctggctcgttacccgctcaccaacggcatcgacatcgggggcggccacgactccctgacggctgccctcatcggcaccttctgctggttcgccggattcgtgttctgggcctcccgtcgatttaccaagagcacgggtcgtcagtgacagattcggccgatctccggaaggagcagtgttatgaccaagcccctcattgcagtggtcaccgcgggccaaggagcgcagaagcctcgcctgctcacgccatggctcaaggtccccggcgtcacggagaagcttgctgcatggtccgctcaggccgatgtggacctcgtcgagctcggtaccagggcgaatgcagaaaccttggcagcgaccgagaatgcgcagccactactggtctgtctcggagtcctcgtctcggatctcctggccgaccagaacattgtgctcgcaggacactccgtgggcgagctgacagcagcgtgtctcgccggggtagttgatcccgggacggccgtcactcttgcacgacggcgtggactggccatggcgcgggcctgcgctctccacccgaccaccatggcggccatcattggtgacaatccggatgacgtcctccggcggctctcggaactgggactcacggctgccaacatcaacggaggcggacagattgttgcggccggctccaccgacgcgatcgcggaactggtggcgacccctcccaacgggaccgcagtcaagccgttgcgagttgctggcgcctttcacaccaagtacatgacgcctgcgcaggacgctttcgcccaagctgctcaagacgtcaccttctccgacccgcagcacccgatcatctccaacctcgacgggcaggagatccggtccggcaatgacctgcgtgaacggctgattgcccaggtgaccgcgccagttcgatgggatctctgcatccagcagatcgcggatcgtcagccggaactcgccctatcggcccctccggggaaggtgcaggcgtcgctcttgtctcggcagatcccggacctcgcgacggtctgcatcaccacaccacgggaggcagcccaggctgcacagcggatcgaccagtccgtatccgtccttcagggggcatgatgctcatccccgagtacttcctcacagcctgttcggaccatgctgagcgcctggcgatcatcacccacaatgacgttgtgacgtgggccgaactggcgactcgcgtcgacggttttcggcgctggctgcgggaccatggcgtgcaccgccaggacagggtcgttctccagacgccaagcaccgtaggcacggtagccctcatgtgggcctgcctgctcgacggcgtgacgatggtcccggtgcaccaggacctcactgcctcccaggtgcagcaagtcatcgacgactgccgtccagctctggtgtgtggcagcccggacctcgtccaactcctcaactcccccggaatgaagacaagcacacctccaacgcggccggagtcaacgagtattctgccgtccttgtcccgggtcagccccgatgaccttgcgatgctcatctatacgtccggcacgacgggtctcccgaaggggatcatgtgtccccaccggcaggtcgccaccgccgcacggatcgtccatgactgtctcgggtaccgcacggacgacgtcattctctgtcgcctgccgttgtccttcgactacgggctctatcagattctgatgtctgccatctccggtagcgcggttgtcctgcgggacggaggcgcgcaggaccgcaacctggtgcgcgacatcgcccgtcacggcgtcactgtcgttccagtcgtgccgtccatggcgtcaatgctcatcaccctgcagcgtcgtgatcagttgccgaccatcgtcagactgttcacgaataccggggcgcgtctggcacccgagaccgcgaaccagttgctcgcaagcttccccggctcccgctatgcgtcgatgtatggcatgacggagtgcaagcgcatctccatccttccggtggaggagtacgagacgcatccggacagcgtgggaagagctctgcccagcactcacgtcgagatcgttgacgctcagggagttccggttccggcgggcgagcacggggagatcacggtgtccggcccgaccgtgatgaacggctactggcaggtgccgaacagtcccagtggacgattccgacccagcggccacggcctcactctgttcaccggtgatcgcggctggatggatgaggagggacgtctctacctcctcgggcgcgacgacgagatcgtcaagcatcacggcatccgaatcagcctgcaggagatcgagatagccgccgaagccgcgccgggcgtcgacgcagtcatcgctctcaagccggcctccgactcggcccccattgaaatcgcctactgcggcagcacgagtcccgagaacctggcccgccatctcgaaaccgtcctggaccgggcgcgacgaccccaattcatccaccaactccagcagatccccctgacccgtaacgggaaaccaaaccggtcagcagccgccgaggccatccgctcaagggcgtgacggcgaaggccaacacccacagacgaaaggaaaccaccatgacccaggccgagttcaaccagttcatcgagtccacctgctccgcgacgatcgtggatcccgaccgtcctttggtcgatcagggcatcgactccctcggaatgctcaccctcatggtcgctatcgaggacagcctcggcatcgaactggatcccgagtccctcgccgacggtaggggttccacgccctccggtcttctgtcccttgtcgagcagccgaaagcgacggtgtgacgacatgacgacgatggttccttgccgccgtgtggagatgccgcaactgttcgaccacatccccggaagcatctctctctcaggagggctgcccgatctgagcgtgctcccgagcaatcagatcgccgaactgacgtcccggatcatgcgtctcggctcaagaatcctcctgcaatactccaccccttcggtctcgtcctccttggtgccggccatcctggacctggcggaacgaacatgcatgtcaccggatccgcggaatctgatcccgaccgcgggttcccaactgggcctggccatggtgatcaatgcctttgacggcgatgagatcatctgtgactgcgccacctatcccggggcgctggccgccttcgcctctgccggcgtggaaacaacgggggtggccagtgacgaggaggggctcaacccagacgcgctcgctcacgccgtcgcagagggtcgggccaatggccgccgcatcgcagccgtctacaccacgcccaccttccagaatcccaccggctccgtacagtccgagaaccgccgtgcggccctgctcaaggtgtgtgctgacaatgacctcctcctcatcgaggacgatccgtacggcatgctgtccttcgacgggcagacgtggccagctctgaagtccatggacccacagcgcgtcatctacctgggcaccttctcgaaggtgttcgcaccgggcgtccgttccggctggatcgatccgcccgccaatcttgtcgagaaactccgcgctgtgtgcgagatcatgacactctcgccatcagccctcaaccaagcgatcatcggcgagtaccaccgtcgtcacggatgggacgaactgttggagggctatcgcgcctcctaccgcgaccgagcccgtctcctcatcggggctctcgaggctgaactggcaagaacgaattgcactggcacgtggacctggcgtgaaccacggggcggcttctacctgtggttggagaacgtcgccagcaccagcggtatcgacgttgcgcgtcgcgccgccgacaacggagtggccgtggtgcccgggaaacacttcgacgcagccggacacgattcgccgagcctgcgggtgtcgttcagcaattcacgcccggctgatctggtcgaaggagctcgtcgtctcgcccgtgcactggtgggagaggacgttcagaaatgactctcgcgacacgcaccgccaccgacaccctgcagcagaccttgccctggggcacccacgaacgtctcgtcttcgggcgggcgctcctgcgcagcaccggcttcccagccgaaggcttggccctgctcgactccgacgacatcctccccctcctcgactcctttcttgccggggacatcgacagaactcacttcgagaaggaatacaccagtcgcgaggagtccggcgcaagggcgctcatcaacgtcttgaaggacgatgcagtatcgcgcgccatcgcatggcagaaccccaccgcgtggaggtccttcgaatccctgtcgtccacgagcggaatcaatgcttcgactcggcgcaaggtacgccaactcgccctctactggcaacgttactgttccaaggctgagaccattggatacttcggcccgttcgcctgggccgaagtcgacccggaggcctctgcggtcgaattcatctcctccgaccatctgatcgaccgttcccacgtcgcaatggaggcgtgggcggtcattgagatcgggaaagccctggcatcacgggccgaccttcagtggtggatgccaccaatcctgtcccccgccgtcgacctcaacatggagagaggcaccgtgacggtggctggacaccagccacgacgggtccgggaggacgaggcacgagttctcttcctgaccgacggcacccgtcccgccgcccagatcgccaagagcctcgacatggagcccgagcggttgcgcaggatcctcgtggcccatgaacgtcgtcacaccgtgatctgggacgccaacatccctgtctcagtgcacgcgtgggacatcctgcacgaacgcattgcccagatcggagacgctgggctgcgagatgaggccactgctgttctcacgaggttcgacgagcttctggaggtcatccgcaacattcccgacgcccggtccctgacggaggcgacggaatccctgtcccgtcttttcgaaaccgtgacaggaacctcttcgaacagacgtgcgggccaggcatatgcagcccgcagcctgtgctacctggactgcacccgcgccggaaccgccaaggttgggacccggcttctcgaagccctcgacgcccccctcaacctcgtcctacaatccgctgactggttcgcggcgaccttggcaaaggaatacaccaccgaaatcacggacctcgcaaatcgaaagcagcgggcctcccaccagccactgaccatggctgatgtctggccgtccacgatgtcgctgttctggggggcctccccgtccccactgcagcgagccgtgaccgaactgtcacggcggtggagcagagtcctcgaggggctgcagccagtcgacggtcgcatcgacacgacatcgtccgctctctcgggcgccgtggacgagcagttccccgtgtgcaccccgattccagaactgtcagtgcacagcccggacctccaggtcatcacctcgagcactagcaacatcgcctccggacgagtcactgcagtcatgggtgagctacatgcctgtctgagcagtctcgacatgccgttgctcgagtggtcgctgccccatggttccattcgcgatcgcatcaacaccgcgctcaacctgcgacgtctggttcccttgttccccgagacatggaggcgcaacaccggccgcatggttccagcgacggtcggagtgggggatcgcgcaatcgggttcactcggacggccgatcaagaccgtgcgaacacatggtcgatgtcggcactgctgttcgagcagaccgaggacggactcatgatccgtgatcccgatggcaggctctggaccatcgcacaagcgtggagcgtgcccatctccatggtcgccgccgatgcgttcaagatcgggctgcccggctcaccagcccctcggctcaccattgacaatctcgtcgtgttccgtcgtacctggaggtttcccgctggctccatcgacatcatgcacggttcagccgccgagaaacacgctcggctgagggagtggcaggtcacgaatcaccttcctgaccacctcttcgtcaagttcccctccgaacccaagccgatctacttctccttcgagtcccccgccatggccacggtcttcacgcgatcactgcagcgcgacgcccgagagaatccagacagtctcgtgacgatgtccgaagcactgcccgagcctcaatcctcatggctgcacgacacccggagccaccactacgtccacgaattccggctgcaactgaccaaggagcgacatgacgaccacagttgagacacatcccgaaacacgtggcacaaccgcgacatccatctccaatctgatcggtcacacccctctcgtaagaatggaccatctgttcgacggcctccccttcgaggtgtacggcaagctcgagaagctcaatcctggcggaagcatcaaggatcgagcagcacaatccatgatcgaacgggcaattcgacggggtgagatcgtcccgggccgtacgaccgtcatcgagtccagttcgggaaatctcggcatcgccgtggcgatactgtgccaggagcacggcctgaatttcatctgcgtaaccgatgccaaggccacgccaacgaacattcgactcatcgaagcgttcggggccactgttgaggtgatcgaagaacctcatcccgagagtggcgaattcctccccatgaggctcaagagggtaagagaactgctgtcagagattccagatgcatggtggccgaatcagtacgggaaccccgacaatccggcggctcacgagcggactgtccgcgagattatcgaggcaatcccgcgggttgacacgattgtctgcgcgaccggctcgtgcggaacccttcgcggctgccacgaagcattgcgaaagctgtccccacgcacccgactcgtcgccgtggacgccaagggcagcgccatcttcgacgaggcaggagcaccccatccccgctgtgtcccgggacacggtgcgtcagtgcgaccgccgctgtggcgcgcggggctcgccgaccaactggttctggtctccgacgcggactgcgtcgtgggatgccaggaggccctgcgcaccgaggctcttctcctcggcggatcctcgggagcaattctgacggccattcaccgagtgtctcccacgattcccgctggttccaccgtggtgacgatcctccccgacggcggcgagcgctacatcgacaccatctacagccgctcgtgggtcgactcacacatccccgggctgccctctctcgccgactggggggctcccaaccccgccaattcgtatgacctgaacagaagtgcctcatgaagctctacaccagagagaccgtcgaaactgcgcttgtcgggcgtcatggccaggttctcagtgccgtacagagtgcatacatgctgcattcgacgggagagacatcgctgccattctcaaccttcctccgcccggccgggtatccgaacgatcggatcatcgcacttcccgcccacatcggaggcgacttcgacatagccggtatcaagtggatctcatccttcccggaaaacctcgaccggggccagcaacgagcttcctccgtactcatcctcaatagtctggagacgggatacccgaccgccctgctggagtccagtcagatttcagcaacgcgaacggcagcatcagccgccctggccagcgccaccctccatggctccgaagaccatgtcagcacgattggcatcatcggctgcggaacaatcaatcttgcaacgatcgactacctcttccacgtgcacccccagatcaacgaggtcctctccttcgatctgaggcgggagcgggcccatgagttctcgcacctcgtcaaggcttcgcacccagaggcccgggtccgtgtcgccaaggagcccgacgagattctggccgcaagcaacaccatcgcgatcgccacgaccgactcgagtcattggttggaccttccgccgtggcacgggccggggcaccaagtcgtcctgcacacgtcgctgcgagacctgtcagtgccctcgatcctggcagcggccaacgtcgttgacgatcctgatcacgtctgccgtgaagcgacgtccttggatctggcaactcagcagaccggcaaccgggacttcatcacggggagaatcggagacctccttcttggcgcgccgctgtcctcaagtcctgactcccgtgtcattttctcacccttcgggctcggcatcctcgacctcgcagtcgcctccgtcgtcattgctgccgcctcctcttcagcagtcgagatcaatgggttcgaccccgggaaacacgccacaagcatgattgaggtgaatcgatgaccaccacacagatcaacgacaacacggccgttctgcgcgacgtattccccgccggctccgtcgcattcgtgagcggtgcctcacgcggaattggcgctgcctgcgcgacagcccttgcggccgcgggatgcaacctcgccatcacttatcgaaggaaggagaacgaggcggcacaaatcgccgaatccattgaagccatcgggcgccagtgcatcacaatgcagatggacgtaaccgatgagaaccaagtgaccagagccttccgcatcattcgccagcattacggacgcctggacgccgcggtcttgaactcgggaatcaccagtgacgggcatcttgcaacaatgagccgctccaagtggagctcggtgatcgacacgaatctgaccggaaccttcctctgcacgcgcgaggcgaccaaggccatgtactcgtccggtggctcgatcgtcatggtcgcgtccaccagtggagttgcagggcgaccgggccaggccaactacgcagccagcaagggcggaatcgttgccatgatgaagacgctggccccggaggttgcggcaaagaacgtccgggtgaatgcggtggcacccggcttcattcagaccgacatggtggcggccgttccaaaagcggcactcgcccaggcaatccaacacatccccatgggccgtcttggcctggcacaggaggttgcgtcagccgttaccttcctggcctccccgctcgccgcctacatcacagggaagaccctcactatcgatggcggaatgatcaacggctgaccccaggacccgcacacccccagtaccgagaaagaaacaacaatgaccgagatcacccacactgccaacagcatccgaacccgcgccgaggaacgttccaacaaagcttggcgcctgaaggaggagatcatctccaagctcggtctcgagaccaagccagaatatgtctcggacaaccaaccgctcttcggacgtggccttgagatggattcccttgacactctcgaagtcgtcgtcgccgtcaacaatgagttcggagtctcggtcaacgacgacgacgtacaggcgttcggctcgatcaatgccatggtcgatttcatcgaggtgaacgagaagtgagttctcttgcgctcgaggcgccacccaaggacgcccgtaagaaattcgcctacgacagcgatgccatcaagacgatgctcccacatcgttggccgatgctcatgattgatcgcgcctacgacgtcgtcccagggaaatcgggcaaaggcatcaagtcggtcagcgtcaatgagccgttcttcgccggtcactaccctgaccattccatcatgcccggcgtcatgatcgtcgagtcgatggctcaactcgtggccgtcatctacgtagccgaggccattcagaacaatcccggcatgacgtcgcacgacgcacgttcaagcgttggttatctcggcgcgatccgtcagatgaagttccgacgcctcgtcactccgggcgaccaactcaccctccacgcccagctcggcgagaaagtgggggctctgcgcgaggtttccgtgagagcactcaatggccgggatgtcgtcgcccagggggaactcgtcgtcaccgagcggtgacacccagccacacacgagaaggaagtcccatgatcgttcgcccctacaggccacgtgatgcggaagcgatcgtacatctctacaacagccattccgactcccccaatccagtgtcgggagggattgttgaggaggagttccagagggagctcgaagaacgtggttcgacagtgttcctagtggccgaggaggccggatccattgtcggcacattcgggatgttccgcacgaatggccgacacaccatggccgatgatgaagtcttcgccgacatgttctatgtcaccccgtcacatcgactctcgacagttccgggacagctaatcactgaagccatcagcgagtgcttcatccagggcatcaacgtgatccgcctcaccgtgaaccccgcgaacatctccgcgctcaaggtttacagaaaagtcggttgtgcctgtctcggggccaccgatgcaggcgaggacgggaacattgagctgtacaacttcatccctctggttcttagggcaaccatcaccaaactcgaccacgattgtattcgagccctggcggacatgacttcgttcgcctgcatcaccgagggacgtccacttgatctgtcccacgacttcatcgtggacgctggacggaagatcgtctcccacagcatccagatcgggcgttcaaccatccacgccatggtcgacacgggctcgaggaccattgtggaggccaccctcgacaaccgcgactgggatgctcctcgccagatcgtcgcccccaccccctgtcagaaccggcccgaggaacagcgaggcaaccctgtccggctggtgcacaagaagcttgaggtcaccttcaacgaaggagtcattgagatcagtacgactggccactggggcccggtcctcgcaatgtcctggccctcctccgtctcgcaccgcgctcacgggtggcgacagggccccgccaagtcgtatcgatgcgagcttctcgagaattgcctcgtcctggatgacgaaggaggagtgaaatgcaccatcagcctcaatgattgccaagtcgcgatccggatggatggtgccccaaaaacggaattgagaatgtaccagtggtgcagcctgcgccagggctatctgacggctgacaccggcatcacgagcttcaaccgggcatccagtgggctcggagtcgccgtccgggactcgtccgagattgtcgccgcgggccttcccgtcatccctgacacaccgatcacatggagtgagggtgacatcacggttcagctcgatccctgcggccgcgcctccctgatccactcgaccctggtggaccgaagaatccacttggacgagtctggctcggcaagtctcaccatgaccgtgtttggtgattcccagccccatcgtgccgacaccgtcgagctgcctcccctcgcggcaggcaccgacaggatcgtcctcaagccggctgccggaggcgtgaccacatggcgcttgggcgccaccaaggtgctcaagtcaccgtggccacacgcccgcgcgctcgggcccaatccgatctggcgagccggcctgtgggtcagtcacgagccggatcgccacgaccgtcgccaaggaatggggtggggtcccgatcatcgcagttggaccctgtcggaagacaccatgaccagtactgacgggacactctcctggcgcttcagcggctcccccgacaccggctggacggtcgacgtcacgacgagcaacacgcacggggagaccgtcgtctggctcaccccggactgcccggcgggcgagaggatccgcacgtctgatcatgccgtgacgaccatgcttgacatctcgaagccatggcagcgctggaccacccgatgcgcaattcctctcagacacgggaagtggttcctcatcgagcctgatcatgacctcactgattcccccgaaatcctcatgcgctctgttcacggggtcctgctcgtcggctgtgtcggacgagcccactccggatccgcttcctggcgctttgccatcacgtcagaactccccacctccaacccaagaagaaacgactacacctcagccgcctgaacccaaccagttggaacacccactacagaagaaatggagcaccaccatgtccatcactgagcagtacaagacccttcgcacctcggtcggcctccacacgcctaccggtcccctggtccgtatcaccggtgatgatcgtctcgagtttctcgacaccttcctgtcccgcgcctcggacttcgtggaccccgacaccactcgggagtgcctcgctctcaccgaggacggccttccgctgacgatcttcctccacatcgagcgcgaggaggagtcatggctccttccccgcaccgccatcgatgcggcgaccctcgccacgtacctcggcaacctcgagaccgatggtgacctgtcaatcgagattgctccagagggttggggagctgtcgctgtcgaggggccgctgtcgtggcagatcgccgaaaaccttctcgacttcgacgtggctggcctcgttcttcacgccgtcacggacgtcgtcgttcccggggcccccgagggatcgaaggcatggctcgcccgggtcggaaccactggagagtacggctacctgctcgtctccaacgttcccgacctcgcccgcacttatctcctcagccgcgccacggagctgggcggtcaggcagtcgacgccgatgctctcgcacgagtccaggccgaggccgggatgccctattacgcgatgggcgtgtgccacctcgatgtcgccgggggtgacctcgcctggctcgtggactggcagcgcatcggcgagttccaaggatccgagaatctgcccacacccgtccgagaccagcgccgactggccgccatcgccctgcccaccggcaaccgcccggaagctggtcagaccgtcgctgccggggatgaggagattggaatggtggtgtacgtcaccccgtccgccaatcccgatgaggaactcgcgttcgcacttctggatgctcctttctggactcccacccttccgttgaccgtcggtgcccacgacgggaccacggtcaccctgccccgcgtcgtggcagcctccagcctcaacaagctggggtgacagcgatgacgatcactgctgagaacgccaccacccgcagcgacattgcccggagcattgcggtgaccggcgtgggactggtcacggcacagggtgaccataccgacgagtgctggaccgaacttgtcgatggggtttgcggaatcaccatgaacgtcacgttcgatgactctggcaccacgattccgtgtgctggcgtggctcccattccgaactctgattcgatcgaccgctgttacctgctcggcgtccatgccatgcgtgaagctctcgagatgagtggcatcgacctggactccgtgggtcgtgatcgcatcggactcgtggtgggctcaagcctcggcgcgatgcccaccttggaggcggctcatcgccgggccattgagaccggcgtgctcgatgccggattggcggcagactcccagctccactgcgtcgccgaccacctcgccgctgagttcgacatccgtggaccccgcgtcgtgacatcgaatgcgtgtgccgctggtgccgtggcgatcggctacgccgcagaactcctctggtccgacgatgtggacctggtcgtctgtggcggtgtcgatccactggcccagatctctgccaatgggttcacgtgcctgggagctctcgacaatctcccatgcagcccgatggccggttcctccggtctgactctgggcgagggagccgggttcatggtcctcgagagaacagatgcggcggctgccagaggccaggaggtgatggccgaaatcgccggctacggcacaagttgtgatggttaccaccagactgccccggacccgggtggcaatggcgcccgcagctcaatggaggccgccctgcgctcagctcatctcaagccgtccgacgtcagctacgtcaatctccacggcaccggtactccgaccaacgacgccgtcgagccgaaggcactccggtcattgttcaagtccgatgaccttccccctgtcagttcggtgaagggcgccatcggtcacactctcggcgctgctggcgccatcgaggccgtgtgctcgatcaaggccatccacgagggggtcctgccgccaaccgtcaacaaccgcgggcaggcttcccgaactggtctcgacatcgtgccggagtgcgcacgcaaggccgctcccgacgtggtcatctccaactccttcgccttcgggggcaacaacgcatcagtggtcatcaccgcacctcgaggaggcgttcactgtaccgccccggcgcagcttcgcgaggtcggaatctcaggaatggcagctctggcgggaaaggccgccaactcggaggagcttctttcggccctgtcagaagattgtccaatctggatggccgatgagaagacctgggaaggggatgctgtccaaaccggccatgtggacatcaagcgcctgtcccgcacaatcaacccgtccaaggttcgtcggatggaccccttgggaatcatctccagcgcggtggtgactgatctgtatgcccgacacgggaagctgagccgcaaggatgccgaaagcacgggaatcatcttcgcaaccggctacggtcctgtgacggcggtgacgcagttcaatgacgggatcatccgccacggttccgagggtgccaacgccctggtgttcccgaacaccgtggtcaacgcagccgcaggccacctcgcgatgctgaatcgctaccgtggttacacggccaccttggcatgcggtggaaccagttcactcatggcgctgcttctcgctgctcgcgtcgttggccgcggcgctgcggatcgcatcatggtcgttatcgctgacgagtttcccagcattgccgtccaggccgtcgcgaagcttcctggctaccgacacagggttgatggttccggagccgtgctctcggaaggcgcggtatgcgtcctggtggaggccgtcgaagtcgccgaagcacgcggtaccgcccccatggcgctgctacgcggcttcggatcccgtggagagtccgtgggagtcggtcacaccgcatccgatggacgggcttgggccaaggccatggccgctgcactgggcccggccggcctgactgcctccgacgtgtcgaccgtcgtggcggcatcaagcggacatcctcgcgtcgaccgagccgagcaggcggccaggcggatcgtcggactgtccgcaaccgctacgaccttcccaaaggcgattgtcggagaaacacacggatcggctgccgggatcgggctgttcggtgccctgtgcggttcgaggtcagccgcgcaccagaacatccttgtcaacgccttttcccacggcggtggttatgcctcgatggtggtggagtcactgtgaccacgacgcttctgccacgggttgcccagccgggaccgggcgtcagccatgtcgacaccgaccgtcccatcgagtgcatcatcacccaccacccccacatgccgcgtgatcgcggaggccacgccacctccgtgtcaggcaggtacttgctgcgccaagccgcagaactcatgctcggcacggatcctgcgcattgccccgtcgtcgacccttcgcggcgctggtactggcccggaatcaatcttcacggttctgtctcccatgtcccgggctggagcctgacgacgctgagcaccggcggccacatcggggcagacatccaggacttccgggagcgtcccggcgcaatggcattcatcggtgacctggtcaagctgtcgcgatcggcgtcactccgagaattcgcggagtgcgaggccgtcgtcaaggtgtccgaattgactaaggagacgttcgggcacgtgcgactgcccgaatggacacccggatggcgccacgttttcgaggactactgggtctggagtctcgagatgcacgggatgggagtcatcgcactcgcatccgatctcccccgagccattcgctggtggcggtgcgacgccgatgcccgtggccgtctccaggctctccgacccataagcagtcttggaccaggaaggccgtcatgagccggtactcacgtcgaatctcaggcatcgaacgcggctatctcaacgccgcaacccggggcccgcaccccaccatccacacgatgatcgacttcgagggccgcgtccccgccgactgttggcggcacgcatccacgattgcgtcggccgccaaccctggcatgacagtggtccggaggtcgggccgatggacatccgatccagcgggctgtccggttgtgttccacgactggaccgcggaccccaacgacgttgccgacttccacgctgacatggatctcgtgacgggaccatcgtccacgctccacgttttcgagggggcggaacgcacccgaatcaccttggcagcaagccatgccgtgaccgatgggcggggcatcgaacgatttctcgtcgacctgcttgcagcgttggacgagcgtgaacccattggaagccccgacaccctgaccgatgtcgatatcaaacgatccttggagaacagcatcaagccccgacgccacctggccgctgtgcccgccgatgtcctttctccactgggggggaggaagaaccaacgtatatgggcctccaggacgtggcacagtgccccgggagccatgagcggaagaatcgctgccgctgtggccgagatgatcgaccacgccgcaatgatcatcatcccggttgacatccggcggcacgtcccagaggtccgatccacagcaaacctaagtgcccaactgccagtgatcatcaccccgaaccagcgctggcaaagcatccatgggcatctgctcacggaccttgctcgccatcgagaccttgcgatcatcagtgaggatttccgccacaacaatccgttcgcatcgaccttggaggaaagccaggccatcggcctcgatggtgtctatccctgtgccgcaatcatctccgaccacgggaagctcgacctttcaaggttccagaccttggaactcaccccggtctcgatgcgaagcctcccgatgctcgttccctactccgcaatgttcatcagcagttgcaccgtcggcgagaccaccactgtcaccatcgctcatcgcgctgatgacgatcccgattccataaacaccttcttccaccacatcgaatcccagatgtccatctgagccacgtcgtccctggagagcaaacatgaccacccaaaatgtcatcaccccgccgcgccccgtcacctcccatgccacggcgaccaggtccgaggctccaccgcgaagcgtcatcagagccatggccatctcgatggtcgcgaccctcatggtcatgctcgacacgaccgtcgtgaacgtgtccttgagcgcgaccaccgcccgcttcgggagcatgggcagcgtgcagtgggtcctcacaagttacctacttgcactgtgcgcgacgatgacggcctccgcctgggtcatcgaccgccttggtccacggctcaccttcatcgcctcaatgaccatgttcctcatcggctcggtgatgtgtgcactgagcgattcagtgtggcaactcgtcactggcaggaccatctccggtgccggagctgggatccttgttccgacagcatccgtcctgcttatccgtggcatcccacgcgaacaacttggcagggtgcaggcactgaatgggagtgtccagttgatcgctcccctgatcggcccgactgtgggcggtctcctcgttgacaggtgcgggggctggccggccatctactgggcgaacgtccccgtagctcttgttcttctgattgaggccgtccgcgtcgatccggacgaaccacacaccgctaagcgccgcctcgatgctctcggcctggtctgtggcagcaccgcgatcgtgctgacagtgcttggtgtctcactcttcggcaggacgtcgcgaaacaccaccttcctgcttacgatcggcgcgcttgcagtcctcgcatgggcgttcttcatcacccacatccgaagggctaccaaccctctgcttgacgtttccctgtatcagaaccctgtctattcatggtccagcttcaacgtagcggtgcttggtttcggtctctacgcccccatggtcgtcatgcccctctatctcgaggcgacgcgccacctcactgccgtccacactggtctggtgatgtcagtggccggcgtcggcgtcattatggccggaatcctgtgcacgaagatcatgggccggatcggtggaggcctcacgatgacagttggcataactctgagcatcatcgccactctgcccctggtccggctgacgaaccacacctcctacatactcctggcagtctgcttggccttgcgtggagcaggaatcagcctgacaatcgtcccagccatgacacgggccttcgagtccatcaagaggacggccatggcggacgcctctgcacagctcaacctgttgcagcgaatcggcgggacaattgcgacagcagtcatcatcgcagttatccaccacgaggccatgctcacccgcggactctcccccacagtgttctcgcacgccaacgtgtggatcctcaccgcgaccgccgtcacccttctgccggccttcgcgcttgcgaaggccgaaagacaacagcaggatctctgagcaccgaggagtactccctcgtagaccctcctctgatctaattgggttcgttccaagtgtgtatctcactccggggagccccgattgctgaaccacatcccgttcaccctggcgagtccctcgtggtacgacgtcccctgggcgcccggatctccgtatctcacaggagatatctcggtcctgccagcggactcgccaaggtggacgacgaccatccggggtccttggcaaatccacatgccacctcgtccgacccttccagaggtggggtggaaagtgcatgtgtctgccaagccatcggaattggaatcggttgcctcagtcgtagcactgtggtgcgtacgccacagcgtccccttcaaagtacttcgcacccgaggtctcgttcacgcgagtcaagtcaagtatgcggaccgaagtcagagcggcaaggtctgcacctgctaccccgacggcgagagccttgagcacttctgctccggtcttgccgagctgcttcagaacgtcgattcacctccggtgtccggcgagctgcgagtcggatcctcccctctgtggttgcgtcacgggagtttccgagaggcatgggcggtgtcatccacaggagtaccgttcccggtctacccgggaacaacacatcctgatcgtcgaggccccgcgcccgcagaatccgatcacgacacgccgtggatccggaggctccgtcggacgaatcgccccagcacggttcttcccatcgacgatgtcagactcctccaccgatcaaatgctggcggcgtgtatcaggcaacatggagagacggcacatcggtagtcgtcaaggaggcccggcacctgtccggacttgatgcggcgggtgtcgacgcccgagtgcggctgcgtcacgagtacgaggccctgagaagactggacccctatcgggccgctccccatcccattgatctcattgagaccgaggacggctcgttcctgatcatggaattccttgacggaatgacagtccaccaggagatgtcgaggttccatcctctgattagtaggcgacctcatcggctatcgatgaccgatttttcacgctggtgccgagaggtcgaagatcgcttgaggaatgtcacgagggtcatggccgggtgcggaatcgttcacggggatcttcatcccgcgaatctgatacatgtcggccatgaggttttggttactgactttgaatcctgctcaatcgacggggtcgccgtctcgtcaggaatcgccgctccctggttccagtcggacgacacgattcccgatccggcgacgactgacgatctccacactcttctcgtggatccgacttgcggccccgcgcttgtcccccatccaaatcttcgcgcgctcatcagccaggccgcagtcgaggacatgatgggaaatccgactggtttaccacatgcctggaacctcgaggacatgacaagcgaactcgccaaggggatccgggcatcagccactcccgcacgagccgaccgcctctttccctcagacccctacctgttcgggcatccaggttcagaattcggcctgatgcatggcgccgccggaatcatggctgctcttgccgtgactgggtacggtgttgacgcgaatcacgtgacctggatgaaggaccgcttggccacccgcccgaccctgctgccggggttggccaacggaatcgagggaattgccctgggtctctccctgtgcggtcagaacgacatggctgcatccctgctccaccagtccggaattctcacgatcacaacgaacggatcgactgacctcaccctcggtactggtatggcgggccgagcgtgcgcgctgcagtccctctcacaacgactgtcatcgaaatctctcgcccacgctgcatataccctctgggaacaactcgccgtggctgtgcggaacactgatgtggccttgccgaacggcctgttctccggttgggagggaatcgggctctccctgcttgcctctcccctgccggatcgtcatgatctcgcccgccactcactccgactggccctggccacgacaacgattgttgacggtgcgctcttctcaggcgagggacagatccgatggccatatctggggcgtggtcccgcggcatgtggcccgctcgccgccaggcttgatgatgaccagacggccaaggccgtggcacagacctgtcgttgtcccctgactgagtcatccggtctccacaatggccgcgcaggtctcctactcgtcctccgccagctcgtgggagaccaagacgacgccgttcgccgccacctcatgagactgtcgtggtcgatggaccgtcgcgaggaaggcacattgctgctgggtgatcatggcctgcgtttctcatccgatctcgcgacggggtcagccggcgccctcctcgccctgagcagggacccatggcggaacatgacacgaatgctcggaatatgcgatgacacctgtcatggcccactagtgacagtttgatctagcgccgatagttcacaactgaaagactccaaacatcgaggaaaacatgctgagccaaaacgccttggcaggcgtggctcgtttcaccacgatgaacaccaggagacagaatgtccgttgaggccatgcaatccatcgagatggacgaggaaaacagcgccagccagacagtttgcgcttgttacagcttcttctcgtggtcaggatgctgcgtagtctcccaagcggtggaagcatcttgatcgtgtgagacgccgtcgactaccctgtcccccgtggtacgcacacgccccgtcctggacagtcccggaagaccgctcatcgcctccggagtcgtcctggcggtcctgctcatcatcgcggtgatgacgatggtgcttcagcgcgaccccactctcacccccggacgccgcattctcggtatcgtcctgtccacggtccaggccgtcggattcatgtggctgcagacccgcatggttcgtcacggcaagggttcgcgcaacatgcgtgcgacccttggaagggtcggtttctgggccacgtggggactcgtcgcagtgggagtcgtcaatctgtggctgaccaactcgtggaccctcttcggggcctccgtcgccacgcccctccttctcctgccaggggtgtggagtgtggtggccaccctcgtgaccctgatcgtcggtttctccgacctcgtggtcacccacacctcgccactgacctcagccacggtcgtgctggtgaccatcgcggtgtcggtgaacctctacgcattcacgaagctgtcgacggcactcgttgaactccgctcctcccaggaggagatcgcccggctgcgcgtggacgccgagcgtcaccggatatcgcgggacctccacgacatcatcggtcgcaccctggtcgccacgtcgatgcgccagcaggcggccctccacctcgtcgaccgcgacccgcaacgggccaaggaacagctcgacgccgcccatgacgcaatcaccgaggggcagcaccagttgcgttccatcatccaggccgagatgagcaccagcctccccgacgagatcagcgacgccacattcctgtgcgaccgactccacatcgacttccgcatggatgaccgcggcagaccgcacaaacccttcgactcggcggcggcggcggccctgcgcgagggaatcacgaacatgctcaagcacagcgcggcgggctactgccacgtcgccatctccccggacctcctgaccgtcaccaacgacggttgtccgcaatcacctcgcccctccaccacaccgggcaccggaatcgaccatctccggtcccagatcgaggcgctcggtgggtcggtgacgacgtcgcggccctcgcggggcaccttccggctccgctgctccttcccgacccggggggcgtccacgaccacacccgcgaccgaaggaggacgatgacgacgagaatcctcctcgccgaggacatcaaactggtggcagaggccttcgaggcactgctctcggtggaaccggagttcgaggtcgtcgcacgggtggcacgcggcgacgacctggtcacatccgccacccgcctgttccccgacgtgatcctggccgacatcgacatgcccgggatgaccggcatcgaggccacccgaatgcttcgcgacaagggataccgcggcagaatcatcctgctcaccgccctgccgggaagcgggcacctgcacgccgcgatggctgccggagccgacgggtacctgctcaagtcgatcaccgcgccctccctcatcaacgccatccgggcggtgtgcaacggccagtcggccatcgacccgaacgtcgccgcggtcgccatgcgcaagggaccctcgcccctcaacgaccgggaaaccgagattctgcgcctagtcgccgacggttcctccaccgcgcagatcgcctcgcggctgtacctcagcaagggcaccgtcaggaactacctgtcgacggcgatgtcgaagctcgacgccgactcacgcacagcggcggtcacgcgggcacgcgaggagggctggctgtagcaggcgacccgctcagcccaccgcccctcagcccgccgactcctgacgcacggcctcctcgaccgcccggctgagcagggacccggccctgaccatcgacgtctccgggtccggctcgagatcggacaacgcgatgatccggtcgaacgcggaccgtttctcctcgggcaggtcacagcgtccgcacaccgcccagacgggcaccccggcgtcccgggcgatcttgcggatggtgtcgggaagcttgccgagcagggtctgctggtccagccgcccctcccccgtgacgacgagactggaggcggagatccgcgacaccgcgcgggaccatcccaggacgaccgccgcgcccgggcggtacctggtccccaggcacatcagcgcccagccgacccggctgggcggctgcgaaccccctggccaccgcccggcaggcctttcccgaactcagcgaccccttgaaggagtcgacggcaacgatgaccggcgcattcggatcaggacgcatgggatcagcatgtcacgtcgatacggagcagtcgcgccgcctacccctagactcgggggcatggtcaaccgagtctacctgtccctgagcgttctcgccctcgtgctgtgggtggtcgcctaccgtcacatgccgggctgggccgcgggcatcaccctggtgggcatcgtcgtgctgtcgctgtggtgcgagtggtcgcgggtgcgcaccctggccaggatcggcaagtcccgccagcagggcccccgctcctcccgaggacgcaacctgtcgtgagcaatacgattcccgcagccctccaccccggccctgacgaggcc

SEQ ID NO: 427 - DNA, 26620 bp, Propionibacterium acnes
ccttgtggacaccacgtcatccacatgacttgtgtcacatgattcccggaccatcatcaagcagatgctcacccaactgtaatgatttctgttctgaatctggacatgctctgacctgcattcaatgatcaattccgtgcgatattccacaacgcacggggaggtcgcagacaatgacaacagaaagcatccccacgcggctgctcgtgtggcacgagcagaccgatccgaccaagctcctcaggatcaccgacgcgatcaggaggggggatccccttccccccatcgaggccatggcgatcggccacagattcctcgtcctcgacggtgcgcaccgggcccaagcccaccagtactgccatcgatctgagatccgagcccgcctccacaacctccccctcagcgcggaaataccaggctggagccactccataccccgcgatgcagcagcgaaactggctcacctactcctccccgtggacgctctcggtcaggcggaaatcgtcctgcacggggtgcgccgtcaggtggggaccgcttcacaacgaccgcgcgacatctttctcgcctgccaccggatcgcgcgagttgcctacgcgcatggaatcagacctctcggcccggagttctccaacgctccgacgatcgacgccgccaccatgacctggcgcccgccgaacgtgggcacgttgtgggccatcgccagcagtctcggacccctgcccgcaactgtgacccggttcgccccgatcctccggcacgacgccatcggggattccgcgatgacacccgtcacctccgccgcgtgacgacccgcgccaattccgccccaccactggatgaggggcagccgcgtggacgatgctcctgttcaggcagggactccatacgagaccaataggaaaatcatgatcaaaaacacaagccctctgaccgtgaaaaatgtctcgaaaacattccgtggctccagcggagaagccatcaaggccgtgcaagacgtgtcattcaccgttgagcgtggtgaggttgtggcattcctcggcccgaacggcgccgggaagtccaccaccatcgacatggctctcggcctcacccgccccgacagcggccagatcgaggtcttcggtactgacccgctcagcgcggcccggtcgggacgctgcaccgcgatgacacagaccggcgggttgctgcccgacctcacgattgggcagaccatggagatcatctcctcgctctatcgtggctcccacatgaatgcctgcatggagcgagcaaggatcacgcatctggccgatcggcaggtgtcgatgtgctcgggaggcgagcgccaacgacttcgcttcgcactggctctgctgcccgatcctgacttcctcatcctcgacgagcccactgcggggatggatgtggaggcgcgccgggacttctgggcagagatccacgaggacacgcgtcgtggtcggacaattctgttcgcaacgcactacctcgacgaggtggacgagttcgccgatcgggtcatcctcatcaaggagggccgcgtcatcgccgacgacacctccgacgcgatccgcaccatgtcggggggttgcaccgttacggcgaccattcccgacttctccctggcacgactgaatctgccgggcacccaactcatcaagcagggcggcgcacgcgttgatctgcaccatcccgattccgatgccctcgcagcgcgagtcatccagctcggcggcaccgacctgcgcgtggtcccccgcagcctcgacgacgccttcctcgctctcacctcaaccaccaaggagtcctgacatgaccgcccaagcgcttcccgcagtcgccactcccaaggcccgccaccgatccgccatctcgctgaagtacttgtggtgcgagatgcgtcgccccttccggcgttcgacgatgctgttcaacctcgccctccccgcagttctgtacctggccctgttccgcaccgtccacaccgccgagctgccggacgggaacttcgcgatgtggatgatgatcggcatcgctgtctacggagcggccactgcgagcaccagctacgcagcctccatctccgtcgacgaggccaacgggtggacccgcaccatccgcctgacgccgttgtcgtcggtcgggtacgtgctggtgaaggtcctctgcgccatggccatcgccctggccccgaccctgctcatcggtctcatcgggctgttgaccggagctcacggcacgctgcgggtctgggtaatcggactgggggcggcttggctcagctcagcaatcttctccgccttcggcctggctctcggactgtccctgcgtcccgaggtcgtcatgcacgtccccggcctggtcatcaccggtctggcgttcctgggcaacgtcttcgtccccctcagcgggacgatgctcaccattggccgctggagccccgcctacggcatcaccgcgctggctcgttacccgctcaccaacggcatcgacatcgggggcggccacgactccctgacggctgccctcatcggcaccttctgctggttcgccggattcgtgttctgggcctcccgtcgatttaccaagagcacgggtcgtcagtgacagattcggccgatctccggaaggagcagtgttatgaccaagcccctcattgcagtggtcaccgcgggccaaggagcgcagaagcctcgcctgctcacgccatggctcaaggtccccggcgtcacggagaagcttgctgcatggtccgctcaggccgatgtggacctcgtcgagctcggtaccagggcgaatgcagaaaccttggcagcgaccgagaatgcgcagccactactggtctgtctcggagtcctcgtctcggatctcctggccgaccagaacattgtgctcgcaggacactccgtgggcgagctgacagcagcgtgtctcgccggggtagttgatcccgggacggccgtcactcttgcacgacggcgtggactggccatggcgcgggcctgcgctctccacccgaccaccatggcggccatcattggtgacaatccggatgacgtcctccggcggctctcggaactgggactcacggctgccaacatcaacggaggcggacagattgttgcggccggctccaccgacgcgatcgcggaactggtggcgacccctcccaacgggaccgcagtcaagccgttgcgagttgctggcgcctttcacaccaagtacatgacgcctgcgcaggacgctttcgcccaagctgctcaagacgtcaccttctccgacccgcagcacccgatcatctccaacctcgacgggcaggagatccggtccggcaatgacctgcgtgaacggctgattgcccaggtgaccgcgccagttcgatgggatctctgcatccagcagatcgcggatcgtcagccggaactcgccctatcggcccctccggggaaggtgcaggcgtcgctcttgtctcggcagatcccggacctcgcgacggtctgcatcaccacaccacgggaggcagcccaggctgcacagcggatcgaccagtccgtatccgtccttcagggggcatgatgctcatccccgagtacttcctcacagcctgttcggaccatgctgagcgcctggcgatcatcacccacaatgacgttgtgacgtgggccgaactggcgactcgcgtcgacggttttcggcgctggctgcgggaccatggcgtgcaccgccaggacagggtcgttctccagacgccaagcaccgtaggcacggtagccctcatgtgggcctgcctgctcgacggcgtgacgatggtcccggtgcaccaggacctcactgcctcccaggtgcagcaagtcatcgacgactgccgtccagctctggtgtgtggcagcccggacctcgtccaactcctcaactcccccggaatgaagacaagcacacctccaacgcggccggagtcaacgagtattctgccgtccttgtcccgggtcagccccgatgaccttgcgatgctcatctatacgtccggcacgacgggtctcccgaaggggatcatgtgtccccaccggcaggtcgccaccgccgcacggatcgtccatgactgtctcgggtaccgcacggacgacgtcattctctgtcgcctgccgttgtccttcgactacgggctctatcagattctgatgtctgccatctccggtagcgcggttgtcctgcgggacggaggcgcgcaggaccgcaacctggtgcgcgacatcgcccgtcacggcgtcactgtcgttccagtcgtgccgtccatggcgtcaatgctcatcaccctgcagcgtcgtgatcagttgccgaccatcgtcagactgttcacgaataccggggcgcgtctggcacccgagaccgcgaaccagttgctcgcaagcttccccggctcccgctatgcgtcgatgtatggcatgacggagtgcaagcgcatctccatccttccggtggaggagtacgagacgcatccggacagcgtgggaagagctctgcccagcactcacgtcgagatcgttgacgctcagggagttccggttccggcgggcgagcacggggagatcacggtgtccggcccgaccgtgatgaacggctactggcaggtgccgaacagtcccagtggacgattccgacccagcggccacggcctcactctgttcaccggtgatcgcggctggatggatgaggagggacgtctctacctcctcgggcgcgacgacgagatcgtcaagcatcacggcatccgaatcagcctgcaggagatcgagatagccgccgaagccgcgccgggcgtcgacgcagtcatcgctctcaagccggcctccgactcggcccccattgaaatcgcctactgcggcagcacgagtcccgagaacctggcccgccatctcgaaaccgtcctggaccgggcgcgacgaccccaattcatccaccaactccagcagatccccctgacccgtaacgggaaaccaaaccggtcagcagccgccgaggccatccgctcaagggcgtgacggcgaaggccaacacccacagacgaaaggaaaccaccatgacccaggccgagttcaaccagttcatcgagtccacctgctccgcgacgatcgtggatcccgaccgtcctttggtcgatcagggcatcgactccctcggaatgctcaccctcatggtcgctatcgaggacagcctcggcatcgaactggatcccgagtccctcgccgacggtaggggttccacgccctccggtcttctgtcccttgtcgagcagccgaaagcgacggtgtgacgacatgacgacgatggttccttgccgccgtgtggagatgccgcaactgttcgaccacatccccggaagcatctctctctcaggagggctgcccgatctgagcgtgctcccgagcaatcagatcgccgaactgacgtcccggatcatgcgtctcggctcaagaatcctcctgcaatactccaccccttcggtctcgtcctccttggtgccggccatcctggacctggcggaacgaacatgcatgtcaccggatccgcggaatctgatcccgaccgcgggttcccaactgggcctggccatggtgatcaatgcctttgacggcgatgagatcatctgtgactgcgccacctatcccggggcgctggccgccttcgcctctgccggcgtggaaacaacgggggtggccagtgacgaggaggggctcaacccagacgcgctcgctcacgccgtcgcagagggtcgggccaatggccgccgcatcgcagccgtctacaccacgcccaccttccagaatcccaccggctccgtacagtccgagaaccgccgtgcggccctgctcaaggtgtgtgctgacaatgacctcctcctcatcgaggacgatccgtacggcatgctgtccttcgacgggcagacgtggccagctctgaagtccatggacccacagcgcgtcatctacctgggcaccttctcgaaggtgttcgcaccgggcgtccgttccggctggatcgatccgcccgccaatcttgtcgagaaactccgcgctgtgtgcgagatcatgacactctcgccatcagccctcaaccaagcgatcatcggcgagtaccaccgtcgtcacggatgggacgaactgttggagggctatcgcgcctcctaccgcgaccgagcccgtctcctcatcggggctctcgaggctgaactggcaagaacgaattgcactggcacgtggacctggcgtgaaccacggggcggcttctacctgtggttggagaacgtcgccagcaccagcggtatcgacgttgcgcgtcgcgccgccgacaacggagtggccgtggtgcccgggaaacacttcgacgcagccggacacgattcgccgagcctgcgggtgtcgttcagcaattcacgcccggctgatctggtcgaaggagctcgtcgtctcgcccgtgcactggtgggagaggacgttcagaaatgactctcgcgacacgcaccgccaccgacaccctgcagcagaccttgccctggggcacccacgaacgtctcgtcttcgggcgggcgctcctgcgcagcaccggcttcccagccgaaggcttggccctgctcgactccgacgacatcctccccctcctcgactcctttcttgccggggacatcgacagaactcacttcgagaaggaatacaccagtcgcgaggagtccggcgcaagggcgctcatcaacgtcttgaaggacgatgcagtatcgcgcgccatcgcatggcagaaccccaccgcgtggaggtccttcgaatccctgtcgtccacgagcggaatcaatgcttcgactcggcgcaaggtacgccaactcgccctctactggcaacgttactgttccaaggctgagaccattggatacttcggcccgttcgcctgggccgaagtcgacccggaggcctctgcggtcgaattcatctcctccgaccatctgatcgaccgttcccacgtcgcaatggaggcgtgggcggtcattgagatcgggaaagccctggcatcacgggccgaccttcagtggtggatgccaccaatcctgtcccccgccgtcgacctcaacagggagagaggcaccgtgacggtggctggacaccagccacgacgggtccgggaggacgaggcacgagttctcttcctgaccgacggcacccgtcccgccgcccagatcgccaagagcctcgacatggagcccgagcggttgcgcaggatcctcgtggcccatgaacgtcgtcacaccgtgatctgggacgccaacatccctgtctcagtgcacgcgtgggacatcctgcacgaacgcattgcccagatcggagacgctgggctgcgagatgaggccactgctgttctcacgaggttcgacgagcttctggaggtcatccgcaacattcccgacgcccggtccctgacggaggcgacggaatccctgtcccgtcttttcgaaaccgtgacaggaacctcttcgaacagacgtgcgggccaggcatatgcagcccgcagcctgtgctacctggactgcacccgcgccggaaccgccaaggttgggacccggcttctcgaagccctcgacgcccccctcaacctcgtcctacaatccgctgactggttcgcggcgaccttggcaaaggaatacaccaccgaaatcacggacctcgcaaatcgaaagcagcgggcctcccaccagccactgaccatggctgatgtctggccgtccacgatgtcgctgttctggggggactcaccgtccccactgcagcgagccgtgaccgaactgtcacggcggtggagcagagtcctcgaggggctgcagccagtcgacggtcgcatcgacacgacatcgtccgctctctcgggcgccgtggacgagcagttccccgtgtgcaccccgattccagaactgtcagtgcacagcccggacctccaggtcatcacctcgagcactagcaacatcgcctccggacgagtcactgcagtcatgggtgagctacatgcctgtctgagcagtctcgacatgccgttgctcgagtggtcgctgccccatggttccattcgcgatcgcatcaacaccgcgctcaacctgcgacgtctggttcccttgttccccgagacatggaggcgcaacaccggccgcatggttccagcgacggtcggagtgggggatcgcgcaatcgggttcactcggacggccgatcaagaccgtgcgaacacatggtcgatgtcggcactgctgttcgagcagaccgaggacggactcatgatccgtgatcccgatggcaggctctggaccatcgcacaagcgtggagcgtgcccatctccatggtcgccgccgatgcgttcaagatcgggctgcccggctcaccagcccctcggctcaccattgacaatctcgtcgtgttccgtcgtacctggaggtttcccgctggctccatcgacatcatgcacggttcagccgccgagaaacacgctcggctgagggagtggcaggtcacgaatcaccttcctgaccacctcttcgtcaagttcccctccgaacccaagccgatctacttctccttcgagtcccccgccatggccacggtcttcacgcgatcactgcagcgcgacgcccgagagaatccagacagtctcgtgacgatgtccgaagcactgcccgagcctcaatcctcatggctgcacgacacccggagccaccactacgtccacgaattccggctgcaactgaccaaggagcgacatgacgaccacagttgagacacatcccgaaacacgtggcacaaccgcgacatccatctccaatctgatcggtcacacccctctcgtaagaatggaccatctgttcgacggcctccccttcgaggtgtacggcaagctcgagaagctcaatcctggcggaagcatcaaggatcgagcagcacaatccatgatcgaacgggcaattcgacggggtgagatcgtcccgggccgtacgaccgtcatcgagtccagttcgggaaatctcggcatcgccgtggcgatactgtgccaggagcacggcctgaatttcatctgcgtaaccgatgccaaggccacgccaacgaacattcgactcatcgaagcgttcggggccactgttgaggtgatcgaagaacctcatcccgagagtggcgaattcctccccatgaggctcaagagggtaagagaactgctgtcagagattccagatgcatggtggccgaatcagtacgggaaccccgacaatccggcggctcacgagcggactgtccgcgagatcatcgaggcaatcccgcgggttgacacgattgtctgcgcgaccggctcgtgcggaacccttcgcggctgccacgaagcattgcgaaagctgtccccacgcacccgactcgtcgccgtggacgccaagggcagcgccatcttcgacgaggcaggagcaccccatccccgctgtgtcccgggacacggtgcgtcagtgcgaccgccgctgtggcgcgcggggctcgccgaccaactggttctggtctccgacgcggactgcgtcgtgggatgccaggaggccctgcgcaccgaggctcttctcctcggcggatcctcgggagcaattctgacggccattcaccgagtgtctcccacgattcccgctggttccaccgtggtgacgatcctccccgacggcggcgagcgctacatcgacaccatctacagccgctcgtgggtcgactcacacatccccgggctgccctctctcgccgactggggggctcccaaccccgccaattcgtatgacctgaacagaagtgcctcatgaagctctacaccagagagaccgtcgaaactgcgcttgtcgggcgtcatggccaggttctcagtgccgtacagagtgcatacatgctgcattcgacgggagagacatcgctgccattctcaaccttcctccgcccggccgggtatccgaacgatcggatcatcgcacttcccgcccacatcggaggcgacttcgacatagccggtatcaagtggatctcatccttcccggaaaacctcgaccggggccagcaacgagcttcctccgtactcatcctcaatagtctggagacgggatacccgaccgccctgctggagtccagtcagatttcagcaacgcgaacggcagcatcagccgccctggccagcgccaccctccatggctccgaagaccatgtcagcacgattggcatcatcggctgcggaacaatcaatcttgcaacgatcgactacctcttccacgtgcacccccagatcaacgaggtcctctccttcgatctgaggcgggagcgggcccatgagttctcgcacctcgtcaaggcttcgcacccagaggcccgggtccgtgtcgccaaggagcccgacgagattctggccgcaagcaacaccatcgcgatcgccacgaccgactcgagtcattggttggaccttccgccgtggcacgggccggggcaccaagtcgtcctgcacacgtcgctgcgagacctgtcagtgccctcgatcctggcagcggccaacgtcgttgacgatcctgatcacgtctgccgtgaagcgacgtccttggatctggcaactcagcagaccggcaaccgggacttcatcacggggagaatcggagacctccttcttggcgcgccgctgtcctcaagtcctgactcccgtgtcattttctcacccttcgggctcggcatcctcgacctcgcagtcgcctccgtcgtcattgctgccgcctcctcttcagcagtcgagatcaatgggttcgaccccgggaaacacgccacaagcatgattgaggtgaatcgatgaccaccacacagatcaacgacaacacggccgttctgcgcgacgtattccccgccggctccgtcgcattcgtgagcggtgcctcacgcggaattggcgctgcctgcgcgacagcccttgcggccgcgggatgcaacctcgccatcacttatcgaaggaaggagaacgaggcggcacaaatcgccgaatccattgaagccatcgggcgccagtgcatcacaatgcagatggacgtaaccgatgagaaccaagtgaccagagccttccgcatcattcgccagcattacggacgcctggacgccgcggtcttgaactcgggaatcaccagtgacgggcatcttgcaacaatgagccgctccaagtggagctcggtgatcgacacgaatctgaccggaaccttcctctgcacgcgcgaggcgaccaaggccatgtactcgtccggtggctcgatcgtcatggtcgcgtccaccagtggagttgcagggcgaccgggccaggccaactacgcagccagcaagggcggaatcgttgccatgatgaagacgctggccccggaggttgcggcaaagaacgtccgggtgaatgcggtggcacccggcttcattcagaccgacatggtggcggccgttccaaaagcggcactcgcccaggcaatccaacacatccccatgggccgtcttggcctggcacaggaggttgcgtcagccgttaccttcctggcctccccgctcgccgcctacatcacagggaagacccttactatcgatggcggaatgatcaacggctgaccccaggacccgcacacccccagtaccgagaaagaaacaacaatgaccgagatcacccacactgccaacagcatccgaacccgcgccgaggaacgttccaacaaagcttggcgcctgaaggaggagatcatctccaagctcggtctcgagaccaagccagaatatgtctcggacaaccaaccgctcttcggacgtggccttgagatggattcccttgacactctcgaagtcgtcgtcgccgtcaacaatgagttcggagtctcggtcaacgacgacgacgtacaggcgttcggctcgatcaatgccatggtcgatttcatcgaggtgaacgagaagtgagttctcttgcgctcgaggcgccacccaaggacgcccgtaagaaattcgcctacgacagcgatgccatcaagacgatgctcccacatcgttggccgatgctcatgattgatcgcgcctacgacgtcgtcccagggaaatcgggcaaaggcatcaagtcggtcagcgtcaatgagccgttcttcgccggtcactaccctgaccattccatcatgcccggcgtcatgatcgtcgagtcgatggctcaactcgtggccgtcatctacgtagccgaggccattcagaacaatcccggcatgacgtcgcacgacgcacgttcaagcgttggttatctcggcgcgatccgtcagatgaagttccgacgcctcgtcactccgggcgaccaactcaccctccacgcccagctcggcgagaaagtgggggctctgcgcgaggtttccgtgagagcactcaatggccgggatgtcgtcgcccagggggaactcgtcgtcaccgagcggtgacacccagccacacacgagaaggaagtcccatgatcgttcgcccctacaggccacgtgatgcggaagcgatcatacatctctacaacagccattccgactcccccaatccagtgtcgggagggattgttgaggaggagttccagagggagctcgaagaacgtggttcgacagtgttcctagtggccgaggaggccggatccattgtcggcacattcgggatgttccgcacgaatggccgacacaccatggccgatgatgaagtcttcgccgacatgttctatgtcaccccgtcacatcgactctcgacagttccgggacagctaatcactgaagccatcagcgagtgcttcatccagggcatcaacgtgatccgcctcaccgtgaaccccgcgaacatctccgcgctcaaggtttacagaaaagtcggttgtgcctgtctcggggccaccgatgcaggcgaggacgggaacattgagctgtacaacttcatccctctggttcttagggcaaccatcaccaaactcgaccacgattgtattcgagccctggcggacatgacttcgttcgcctgcatcaccgagggacgtccacttgatctgtcccacgacttcatcgtggacgctggacggaagatcgtctcccacagcatccagatcgggcgttcaaccatccacgccatggtcgacacgggctcgaggaccattgtggaggccaccctcgacaaccgcgactgggatgctcctcgccagatcgtcgcccccaccccctgtcagaaccggcccgaggaacagcgaggcaaccctgtccggctggtgcacaagaagcttgaggtcaccttcaacgaaggagtcattgagatcagtacgactggccactggggcccggtcctcgcaatgtcctggccctcctccgtctcgcaccgcgctcacgggtggcgacagggccccgccaagtcgtatcgatgcgagcttctcgagaattgcctcgtcctggatgacgaaggaggagtgaaatgcaccatcagcctcaatgattgccaagtcgcgatccggatggatggtgccccaaaaacggaattgagaatgtaccagtggtgcagcctgcgccagggctatctgacggctgacaccggcatcacgagcttcaaccgggcatccagtgggctcggagtcgccgtccgggactcgtccgagattgtcgccgcgggccttcccgtcatccctgacacaccgatcacatggagtgagggtgacatcacggttcagctcgatccctgcggccgcgcctccctgatccactcgaccctggtggaccgaagaatccacttggacgagtctggctcggcaagtctcaccatgaccgtgtttggtgattcccagccccatcgtgccgacaccgtcgagctgcctcccctcgcggcaggcaccgacaggatcgtcctcaagccggctgccggaggcgtgaccacatggcgcttgggcgccaccaaggtgctcaagtcaccgtggccacacgcccgcgcgctcgggcccaatccgatctggcgagccggcctgtgggtcagtcacgagccggatcgccacgaccgtcgccaaggaatggggtggggtcccgatcatcgcagttggaccctgtcggaagacaccatgaccagtactgacgggacactctcctggcgcttcagcggctcccccgacaccggctggacggtcgacgtcacgacgagcaacacgcacggggagaccgtcgtctggctcaccccggactgcccggcgggcgagaggatccgcacgtctgatcatgccgtgacgaccatgcttgacatctcgaagccatggcagcgctggaccacccgatgcgcaattcctctcagacacgggaagtggttcctcatcgagcctgatcatgacctcactgattcccccgaaatcctcatgcgctctgttcacggggtcctgctcgtcggctgtgtcggacgagcccactccggatccgcttcctggcgctttgccatcacgtcagaactccccacctccaacccaagaagaaacgactacacctcagccgcctgaacccaaccagttggaacacccactacagaagaaatggagcaccaccatgtccatcactgagcagtacaagacccttcgcacctcggtcggcctccacacgcctaccggtcccctggtccgtatcaccggtgatgatcgtctcgagtttctcgacaccttcctgtcccgcgcctcggacttcgtggaccccgacaccactcgggagtgcctcgctctcaccgaggacggccttccgctgacgatcttcctccacatcgagcgcgaggaggagtcatggctccttccccgcaccgccatcgatgcggcgaccctcgccacgtacctcggcaacctcgagaccgatggtgacctgtcaatcgagattgctccagagggttggggagctgtcgctgtcgaggggccgctgtcgtggcagatcgccgaaaaccttctcgacttcgacgtggctggcctcgttcttcacgccgtcacggacgtcgtcgttcccggggcccccgagggatcgaaggcatggctcgcccgggtcggaaccactggagagtacggctacctgctcgtctccaacgttcccgacctcgcccgcacttatctcctcagccgcgccacggagctgggcggtcaggcagtcgacgccgatgctctcgcacgagtccaggccgaggccgggatgccctattacgcgatgggcgtgtgccacctcgatgtcgccgggggtgacctcgcctggctcgtggactggcagcgcatcggcgagttccaaggatccgagaatctgcccacacccgtccgagaccagcgccgactggccgccatcgccctgcccaccggcaaccgcccggaagctggtcagaccgtcgctgccggggatgaggagattggaatggtggtgtacgtcaccccgtccgccaatcccgatgaggaactcgcgttcgcacttctggatgctcctttctggactcccacccttccgttgaccgtcggtgcccacgacgggaccacggtcaccctgccccgcgtcgtggcagcctccagcctcaacaagctggggtgacagcgatgacgatcactgctgagaacgccaccacccgcagcgacattgcccggagcattgcggtgaccggcgtggggctggtcacggcacagggtgaccataccgacgagtgctggaccgaacttgtcgatggggtttgcggaatcaccatgaacgtcacgttcgatgactctggcaccacgattccgtgtgctggcgtggctcccattccgaactctgattcgatcgaccgctgttacctgctcggcgtccatgccatgcgtgaagctctcgagatgagtggcatcgacctggactccgtgggtcgtgatcgcatcggactcgtggtgggctcaagcctcggcgcgatgcccaccttggaggcggctcatcgccgggccattgagaccggcgtgctcgatgccggattggcggcagactcccagctccactgcgtcgccgaccacctcgccgctgagttcgacatccgtggaccccgcgtcgtgacatcgaatgcgtgtgccgctggtgccgtggcgatcggctacgccgcagaactcctctggtccgacgatgtggacctggtcgtctgtggcggtgtcgatccactggcccagatctctgccaatgggttcacgtgcctgggagctctcgacaatctcccatgcagcccgatggccggttcctccggtctgactctgggcgagggagccgggttcatggtcctcgagagaacagatgcggcggctgccagaggccaggaggtgatggccgaaatcgccggctacggcacaagttgtgatggttaccaccagactgccccggacccgggtggcaatggcgcccgcagctcaatggaggccgccctgcgctcagctcatctcaagccgtccgacgtcagctacgtcaatctccacggcaccggtactccgaccaacgacgccgtcgagccgaaggcactccggtcattgttcaagtccgatgaccttccccctgtcagttcggtgaagggcgccatcggtcacactctcggcgctgctggcgccatcgaggccgtgtgctcgatcaaggccatccacgagggggtcctgccgccaaccgtcaacaaccgcgggcaggcttcccgaactggtctcgacatcgtgccggagtgcgcacgcaaggccgctcccgacgtggtcatctccaactccttcgccttcgggggcaacaacgcatcagtggtcatcaccgcacctcgaggaggcgttcactgtaccgccccggcgcagcttcgcgaggtcggaatctcaggaatggcagctctggcgggaaaggccgccaactcggaggagcttctttcggccctgtcagaagattgtccaatctggatggccgatgagaagacctgggaaggggatgctgtccaaaccggccatgtggacatcaagcgcctgtcccgcacaatcaacccgtccaaggttcgtcggatggaccccttgggaatcatctccagcgcggtggtgactgatctgtatgcccgacacgggaagctgagccgcaaggatgccgaaagcacgggaatcatcttcgcaaccggctacggtcctgtgacggcggtgacgcagttcaatgacgggatcatccgccacggttccgagggtgccaacgccctggtgttcccgaacaccgtggtcaacgcagccgcaggccacctcgcgatgctgaatcgctaccgtggttacacggccaccttggcatgcggtggaaccagttcactcatggcgctgcttctcgctgctcgcgtcgttggccgcggcgctgcggatcgcatcatggtcgttatcgctgacgagtttcccagcattgccgtccaggccgtcgcgaagcttcctggctaccgacacagggttgatggttccggagccgtgctctcggaaggcgcggtatgcgtcctggtggaggccgtcgaagtcgccgaagcacgcggtaccgcccccatggcgctgctacgcggcttcggatcccgtggagagtccgtgggagtcggtcacaccgcatccgatggacgggcttgggccaaggccatggccgctgcactgggcccggccggcctgactgcctccgacgtgtcgaccgtcgtggcggcatcaagcggacatcctcgcgtcgaccgagccgagcaggcggccaggcggatcgtcggactgtccgcaaccgctacgaccttcccaaaggcgattgtcggagaaacacacggatcggctgccgggatcgggctgttcggtgccctgtgcggttcgaggtcagccgcgcaccagaacatccttgtcaacgccttttcccacggcggtggttatgcctcgatggtggtggagtcactgtgaccacgacgcttctgccacgggttgcccagccgggaccgggcgtcagccatgtcgacaccgaccgtcccatcgagtgcatcatcacccaccacccccacatgccgcgtgatcgcggaggccacgccacctccgtgtcaggcaggtacttgctgcgccaagccgcagaactcatgctcggcacggatcctgcgcattgccccgtcgtcgacccttcgcggcgctggtactggcccggaatcaatcttcacggttctgtctcccatgtcccgggctggagcctgacgacgctgagcaccggcggccacatcggggcagacatccaggacttccgggagcgtcccggcgcaatggcattcatcggtgacctggtcaagctgtcgcgatcggcgtcactccgagaattcgcggagtgcgaggccgtcgtcaaggtgtccgaattgactaaggagacgttcgggcacgtgcgactgcccgaatggacacccggatggcgccacgttttcgaggactactgggtctggagtctcgagatgcacgggatgggagtcatcgcactcgcatccgatctcccccgagccattcgctggtggcggtgcgacgccgatgcccgtggccgtctccaggctctccgacccataagcagtcttggaccaggaaggccgtcatgagccggtactcacgtcgaatctcaggcatcgaacgcggctatctcaacgccgcaacccggggcccgcaccccaccatccacacgatgatcgacttcgagggccgcgtccccgccgactgttggcggcacgcatccacgattgcgtcggccgccaaccctggcatgacagtggtccggaggtcgggccgatggacatccgatccagcgggctgtccggttgtgttccacgactggaccgcggaccccaacgacgttgccgacttccacgctgacatggatctcgtgacgggaccatcgtccacgctccacgttttcgagggggcggaacgcacccgaatcaccttggcagcaagccatgccgtgaccgatgggcggggcatcgaacgatttctcgtcgacctgcttgcagcgttggacgagcgtgaacccattggaagccccgacaccctgaccgatgtcgatatcaaacgatccttggagaacagcatcaagccccgacgccacctggccgctgtgcccgccgatgtcctttctccactgggggggaggaagaaccaacgtatatgggcctccaggacgtggcacagtgccccgggagccatgagcggaagaatcgctgccgctgtggccgagatgatcgaccacgccgcaatgatcatcatcccggttgacatccggcggcacgtcccagaggtccgatccacagcaaacctaagtgcccaactgccagtgatcatcaccccgaaccagcgctggcaaagcatccatgggcatctgctcacggaccttgctcgccatcgagaccttgcgatcatcagtgaggatttccgccacaacaatccgttcgcatcgaccttggaggaaagccaggccatcggcctcgatggtgtctatccctgtgccgcaatcatctccgaccacgggaagctcgacctttcaaggttccagaccttggaactcaccccggtctcgatgcgaagcctcccgatgctcgttccctactccgcaatgttcatcagcagttgcaccgtcggcgagaccaccactgtcaccatcgctcatcgcgctgatgacgatcccgattccataaacaccttcttccaccacatcgaatcccagatgtccatctgagccacgtcgtccctggagagcaaacatgaccacccaaaatgtcatcaccccgccgcgccccgtcacctcccatgccacggcgaccaggtccgaggctccaccgcgaagcgtcatcagagccatggccatctcgatggtcgcgaccctcatggtcatgctcgacacgaccgtcgtgaacgtgtccttgagcgcgaccaccgcccgcttcgggagcatgggcagcgtgcagtgggtcctcacaagttacctacttgcactgtgcgcgacgatgacggcctccgcctgggtcatcgaccgccttggtccacggctcaccttcatcgcctcaatgaccatgttcctcatcggctcggtgatgtgtgcactgagcgattcagtgtggcaactcgtcactggcaggaccatctccggtgccggagctgggatccttgttccgacagcatccgtcctgcttatccgtggcatcccacgcgaacaacttggcagggtgcaggcactgaatgggagtgtccagttgatcgctcccctgatcggcccgactgtgggcggtctcctcgttgacaggtgcgggggctggccggccatctactgggcgaacgtccccgtagctcttgttcttctgattgaggccgtccgcgtcgatccggacgaaccacacaccgctaagcgccgcctcgatgctctcggcctggtctgtggcagcaccgcgatcgtgctgacagtgcttggtgtctcactcttcggcaggacgtcgcgaaacaccaccttcctgcttacgatcggcgcgcttgcagtcctcgcatgggcgttcttcatcacccacatccgaagggctaccaaccctctgcttgacgtttccctgtatcagaaccctgtctattcatggtccagcttcaacgtagcggtgcttggtttcggtctctacgcccccatggtcgtcatgcccctctatctcgaggcgacgcgccacctcactgccgtccacactggtctggtgatgtcagtggccggcgtcggcgtcattatggccggaatcctgtgcacgaagatcatgggccggatcggtggaggcctcacgatgacagttggcataactctgagcatcatcgccactctgcccctggtccggctgacgaaccacacctcctacatactcctggcagtctgcttggccttgcgtggagcaggaatcagcctgacaatcgtcccagccatgacacgggccttcgagtccatcaagaggacggccatggcggacgcctctgcacagctcaacctgttgcagcgaatcggcgggacaattgcgacagcagtcatcatcgcagttatccaccacgaggccatgctcacccgcggactctcccccacagtgttctcgcacgccaacgtgtggatcctcaccgcgaccgccgtcacccttctgccggccttcgcgcttgcgaaggccgaaagacaacagcaggatctctgagcaccgaggagtactccctcgtagaccctcctctgatctaattgggttcgttccaagtgtgtatctcactccggggagccccgattgctgaaccacatcccgttcaccctggcgagtccctcgtggtacgacgtcccctgggcgcccggatctccgtatctcacaggagatatctcggtcctgccagcggactcgccaaggtggacgacgaccatccggggtccttggcaaatccacatgccacctcgtccgacccttccagaggtggggtggaaagtgcatgtgtctgccaagccatcggaattggaatcggttgcctcagtcgtagcactgtggtgcgtacgccacagcgtccccttcaaagtacttcgcacccgaggtctcgttcacgcgagtcaagtcaagtatgcggaccgaagtcagagcggcaaggtctgcacctgctaccccgacggcgagagccttgagcacttctgctccggtcttgccgagctgcttcagaacgtcgattcacctccggtgtccggcgagctgcgagtcggatcctcccctctgtggttgcgtcacgggagtttccgagaggcatgggcggtgtcatccacaggagtaccgttcccggtctacccgggaacaacacatcctgatcgtcgaggccccgcgcccgcagaatccgatcacgacacgccgtggatccggaggctccgtcggacgaatcgccccagcacggttcttcccatcgacgatgtcagactcctccaccgatcaaatgctggcggcgtgtatcaggcaacatggagagacggcacatcggtagtcgtcaaggaggcccggcacctgtccggacttgatgcggcgggtgtcgacgcccgagtgcggctgcgtcacgagtacgaggccctgagaagactggacccctatcgggccgctccccatcccattgatctcattgagaccgaggacggctcgttcctgatcatggaattccttgacggaatgacagtccaccaggagatgtcgaggttccatcctctgattagtaggcgacctcatcggctatcgatgaccgatttttcacgctggtgccgagaggtcgaagatcgcttgaggaatgtcacgagggtcatggccgggtgcggaatcgttcacggggatcttcatcccgcgaatctgatacatgtcggccatgaggttttggttactgactttgaatcctgctcaatcgacggggtcgccgtctcgtcagggatcgccgctccctggttccagtcggacgacacgattcccgatccggcgacgactgacgatctccacactcttctcgtggatccgacttgcggccccgcgcttgtcccccatccaaatcttcgcgcgctcatcagccaggccgcagtcgaggacatgatgggaaatccgactggtttaccacatgcctggaacctcgaggacatgacaagcgaactcgccaaggggatccgggcatcagccactcccgcacgagccgaccgcctctttccctcagacccctacctgttcgggcatccaggttcagaattcggcctgatgcatggcgccgccggaatcatggctgctcttgccgtgactgggtacggtgttgacgcgaatcacgtgacctggatgaaggaccgcttggccacccgcccgaccctgctgccggggttggccaacggaatcgagggaattgccctgggtctctccctgtgcggtcagaacgacatggctgcatccctgctccaccagtccggaattctcacgatcacaacgaacggatcgactgacctcaccctcggtactggtatggcgggccgagcgtgcgcgctgcagtccctctcacaacgactgtcatcgaaatctctcgcccacgctgcatataccctctgggaacaactcgccgtggctgtgcggaacactgatgtggccttgccgaacggcctgttctccggttgggagggaatcgggctctccctgcttgcctctcccctgccggatcgtcatgatctcgcccgccactcactccgactggccctggccacgacaacgattgttgacggtgcgctcttctcaggcgagggacagatccgatggccatatctggggcgtggtcccgcggcatgtggcccgctcgccgccaggcttgatgatgaccagacggccaaggccgtggcacagacctgtcgttgtcccctgactgagtcatccggtctccacaatggccgcgcaggtctcctactcgtcctccgccagctcgtgggagaccaagacgacgccgttcgccgccacctcatgagactgtcgtggtcgatggaccgtcgcgaggaaggcacattgctgctgggtgatcatggcctgcgtttctcatccgatctcgcgacggggtcagccggcgccctcctcgccctgagcagggacccatggcggaacatgacacgaatgctcggaatatgcgatgacacctgtcatggcccactagtgacagtttgatctagcgccgatagttcacaactgaaagactccaaacatcgaggaaaacatgctgagccaaaacgccttggcaggcgtggctcgtttcaccacgatgaacaccaggagacagaatgtccgttgaggccatgcaatccatcgagatggacgaggaaaacagcgccagccagacagtttgcgcttgttacagcttcttctcgtggtcaggatgctgcgtagtctcccaagcggtggaagcatcttgatcgtgtgagacgccgtcgactaccctgtcccccgtggtacgcacacgccccgtcctggacagtcccggaagaccgctcatcgcctccggagtcgtcctggcggtcctgctcatcatcgcggtgatgacgatggtgcttcagcgcgaccccactctcacccccggacgccgcattctcggtatcgtcctgtccacggtccaggccgtcggattcatgtggctgcagacccgcatggttcgtcacggcaagggttcgcgcaacatgcgtgcgacccttggaagggtcggtttctgggccacgtggggactcgtcgcagtgggagtcgtcaatctgtggctgaccaactcgtggaccctcttcggggcctccgtcgccacgcccctccttctcctgccaggggtgtggagtgtggtggccaccctcgtgaccctgatcgtcggtttctccgacctcgtggtcacccacacctcgccactgacctcagccacggtcgtgctggtgaccatcgcggtgtcggtgaacctctacgcattcacgaagctgtcgacggcactcgttgaactccgctcctcccaggaggagatcgcccggctgcgcgtggacgccgagcgtcaccggatatcgcgggacctccacgacatcatcggtcgcaccctggtcgccacgtcgatgcgccagcaggcggccctccacctcgtcgaccgcgacccgcaacgggccaaggaacagctcgacgccgcccatgacgcaatcaccgaggggcagcaccagttgcgttccatcatccaggccgagatgagcaccagcctccccgacgagatcagcgacgccacattcctgtgcgaccgactccacatcgacttccgcatggatgaccgcggcagaccgcacaaacccttcgactcggcggcggcggcggccctgcgcgagggaatcacgaacatgctcaagcacagcgcggcgggctactgccacgtcgccatctccccggacctcctgaccgtcaccaacgacggttgtccgcaatcacctcgcccctccaccacaccgggcaccggaatcgaccatctccggtcccagatcgaggcgctcggtgggtcggtgacgacgtcgcggccctcgcggggcaccttccggctccgctgctccttcccgacccggggggcgtccacgaccacacccgcgaccgaaggaggacgatgacgacgagaatcctcctcgccgaggacatcaaactggtggcagaggccttcgaggcactgctctcggtggaaccggagttcgaggtcgtcgcacgggtggcacgcggcgacgacctggtcacatccgccacccgcctgttccccgacgtgatcctggccgacatcgacatgcccgggatgaccggcatcgaggccacccgaatgcttcgcgacaagggataccgcggcagaatcatcctgctcaccgccctgccgggaagcgggcacctgcacgccgcgatggctgccggagccgacgggtacctgctcaagtcgatcaccgcgccctccctcatcaacgccatccgggcggtgtgcaacggccagtcggccatcgacccgaacgtcgccgcggtcgccatgcgcaagggaccctcgcccctcaacgaccgggaaaccgagattctgcgcctagtcgccgacggttcctccaccgcgcagatcgcctcgcggctgtacctcagcaagggcaccgtcaggaactacctgtcgacggcgatgtcgaagctcgacgccgactcacgcacagcggcggtcacgcgggcacgcgaggagggctggctgtagcaggcgacccgctcagcccaccgcccctcagcccgccgactcctgacgcacggcctcctcgaccgcccggctgagcagggacccggccctgaccatcgacgtctccgggtccggctcgaggtcggacaacgcgatgatccggtcgaacgcggaccgtttctcctcgggcaggtcacagcgtccgcacaccgcccagacgggcaccccggcgtcccgggcgatcttgcggatggtgtcgggaagcttgccgagcagggtctgctggtccagccgcccctcccccgtgacgacgagactggaggcggagatccgcgacaccgcgcgggaccatcccaggacgaccgccgcgcccgggcggtacctggtccccaggcacatcagcgcccagccgacccggctgggcggctgcgaaccccctggccaccgcccggcaggcctttcccgaactcagcgaccccttgaaggagtcgacggcaacgatgaccggcgcattcggatcaggacgcatgggatcagcatgtcacgtcgatacggagcagtcgcgccgcctacccctagactcgggggcatggtcaaccgagtctacctgtccctgagcgttctcgccctcgtgctgtgggtggtcgcctaccgtcacatgccgggctgggccgcgggcatcaccctggtgggcatcgtcgtgctgtcgctgtggtgcgagtggtcgcgggtgcgcaccctggccaggatcggcaagtcccgccagcagggcccccgctcctcccgaggacgcaacctgtcgtgagcaatacgattcccgcagccctccaccccggccctgacgaggcc

SEQ ID NO: 428 - DNA, 26620 bp, Propionibacterium acnes
ccttgtggacaccacgtcatccacatgacttgtgtcacatgattcccggaccatcatcaagcagatgctcacccaactgtaatgatttctgttctgaatctggacatgctctgacctgcattcaatgatcaattccgtgcgatattccacaacgcacggggaggtcgcagacaatgacaacagaaagcatccccacgcggctgctcgtgtggcacgagcagaccgatccgaccaagctcctcaggatcaccgacgcgatcaggaggggggatccccttccccccatcgaggccatggcgatcggccacagattcctcgtcctcgacggtgcgcaccgggcccaagcccaccagtactgccatcgatctgagatccgagcccgcctccacaacctccccctcagcgcggaaataccaggctggagccactccataccccgcgatgcagcagcgaaactggctcacctactcctccccgtggacgctctcggtcaggcggaaatcgtcctgcacggggtgcgccgtcaggtggggaccgcttcacaacgaccgcgcgacatctttctcgcctgccaccggatcgcgcgagttgcctacgcgcatggaatcagacctctcggcccggagttctccaacgctccgacgatcgacgccgccaccatgacctggcgcccgccgaacgtgggcacgttgtgggccatcgccagcagtctcggacccctgcccgcaactgtgacccggttcgccccgatcctccggcacgacgccatcggggattccgcgatgacacccgtcacctccgccgcgtgacgacccgcgccaattccgccccaccactggatgaggggcagccgcgtggacgatgctcctgttcaggcagggactccatacgagaccaataggaaaatcatgatcaaaaacacaagccctctgaccgtgaaaaatgtctcgaaaacattccgtggctccagcggagaagccatcaaggccgtgcaagacgtgtcattcaccgttgagcgtggtgaggttgtggcattcctcggcccgaacggcgccgggaagtccaccaccatcgacatggctctcggcctcacccgccccgacagcggccagatcgaggtcttcggtactgacccgctcagcgcggcccggtcgggacgctgcaccgcgatgacacagaccggcgggttgctgcccgacctcacgattgggcagaccatggagatcatctcctcgctctatcgtggctcccacatgaatgcctgcatggagcgagcaaggatcacgcatctggccgatcggcaggtgtcgatgtgctcgggaggcgagcgccaacgacttcgcttcgcactggctctgctgcccgatcctgacttcctcatcctcgacgagcccactgcggggatggatgtggaggcgcgccgggacttctgggcagagatccacgaggacacgcgtcgtggtcggacaattctgttcgcaacgcactacctcgacgaggtggacgagttcgccgatcgggtcatcctcatcaaggagggccgcgtcatcgccgacgacacctccgacgcgatccgcaccatgtcggggggttgcaccgttacggcgaccattcccgacttctccctggcacgactgaatctgccgggcacccaactcatcaagcagggcggcgcacgcgttgatctgcaccatcccgattccgatgccctcgcagcgcgagtcatccagctcggcggcaccgacctgcgcgtggtcccccgcagcctcgacgacgccttcctcgctctcacctcaaccaccaaggagtcctgacatgaccgcccaagcgcttcccgcagtcgccactcccaaggcccgccaccgatccgccatctcgctgaagtacttgtggtgcgagatgcgtcgccccttccggcgttcgacgatgctgttcaacctcgccctccccgcagttctgtacctggccctgttccgcaccgtccacaccgccgagctgccggacgggaacttcgcgatgtggatgatgatcggcatcgctgtctacggagcggccactgcgagcaccagctacgcagcctccatctccgtcgacgaggccaacgggtggacccgcaccatccgcctgacgccgttgtcgtcggtcgggtacgtgctggtgaaggtcctctgcgccatggccatcgccctggccccgaccctgctcatcggtctcatcgggctgttgaccggagctcacggcacgctgcgggtctgggtaatcggactgggggcggcttggctcagctcagcaatcttctccgccttcggcctggctctcggactgtccctgcgtcccgaggtcgtcatgcacgtccccggcctggtcatcaccggtctggcgttcctgggcaacgtcttcgtccccctcagcgggacgatgctcaccattggccgctggagccccgcctacggcatcaccgcgctggctcgttacccgctcaccaacggcatcgacatcgggggcggccacgactccctgacggctgccctcatcggcaccttctgctggttcgccggattcgtgttctgggcctcccgtcgatttaccaagagcacgggtcgtcagtgacagattcggccgatctccggaaggagcagtgttatgaccaagcccctcattgcagtggtcaccgcgggccaaggagcgcagaagcctcgcctgctcacgccatggctcaaggtccccggcgtcacggagaagcttgctgcatggtccgctcaggccgatgtggacctcgtcgagctcggtaccagggcgaatgcagaaaccttggcagcgaccgagaatgcgcagccactactggtctgtctcggagtcctcgtctcggatctcctggccgaccagaacattgtgctcgcaggacactccgtgggcgagctgacagcagcgtgtctcgccggggtagttgatcccgggacggccgtcactcttgcacgacggcgtggactggccatggcgcgggcctgcgctctccacccgaccaccatggcggccatcattggtgacaatccggatgacgtcctccggcggctctcggaactgggactcacggctgccaacatcaacggaggcggacagattgttgcggccggctccaccgacgcgatcgcggaactggtggcgacccctcccaacgggaccgcagtcaagccgttgcgagttgctggcgcctttcacaccaagtacatgacgcctgcgcaggacgctttcgcccaagctgctcaagacgtcaccttctccgacccgcagcacccgatcatctccaacctcgacgggcaggagatccggtccggcaatgacctgcgtgaacggctgattgcccaggtgaccgcgccagttcgatgggatctctgcatccagcagatcgcggatcgtcagccggaactcgccctatcggcccctccggggaaggtgcaggcgtcgctcttgtctcggcagatcccggacctcgcgacggtctgcatcaccacaccacgggaggcagcccaggctgcacagcggatcgaccagtccgtatccgtccttcagggggcatgatgctcatccccgagtacttcctcacagcctgttcggaccatgctgagcgcctggcgatcatcacccacaatgacgttgtgacgtgggccgaactggcgactcgcgtcgacggttttcggcgctggctgcgggaccatggcgtgcaccgccaggacagggtcgttctccagacgccaagcaccgtaggcacggtagccctcatgtgggcctgcctgctcgacggcgtgacgatggtcccggtgcaccaggacctcactgcctcccaggtgcagcaagtcatcgacgactgccgtccagctctggtgtgtggcagcccggacctcgtccaactcctcaactcccccggaatgaagacaagcacacctccaacgcggccggagtcaacgagtattctgccgtccttgtcccgggtcagccccgatgaccttgcgatgctcatctatacgtccggcacgacgggtctcccgaaggggatcatgtgtccccaccggcaggtcgccaccgccgcacggatcgtccatgactgtctcgggtaccgcacggacgacgtcattctctgtcgcctgccgttgtccttcgactacgggctctatcagattctgatgtctgccatctccggtagcgcggttgtcctgcgggacggaggcgcgcaggaccgcaacctggtgcgcgacatcgcccgtcacggcgtcactgtcgttccagtcgtgccgtccatggcgtcaatgctcatcaccctgcagcgtcgtgatcagttgccgaccatcgtcagactgttcacgaataccggggcgcgtctggcacccgagaccgcgaaccagttgctcgcaagcttccccggctcccgctatgcgtcgatgtatggcatgacggagtgcaagcgcatctccatccttccggtggaggagtacgagacgcatccggacagcgtgggaagagctctgcccagcactcacgtcgagatcgttgacgctcagggagttccggttccggcgggcgagcacggggagatcacggtgtccggcccgaccgtgatgaacggctactggcaggtgccgaacagtcccagtggacgattccgacccagcggccacggcctcactctgttcaccggtgatcgcggctggatggatgaggagggacgtctctacctcctcgggcgcgacgacgagatcgtcaagcatcacggcatccgaatcagcctgcaggagatcgagatagccgccgaagccgcgccgggcgtcgacgcagtcatcgctctcaagccggcctccgactcggcccccattgaaatcgcctactgcggcagcacgagtcccgagaacctggcccgccatctcgaaaccgtcctggaccgggcgcgacgaccccaattcatccaccaactccagcagatccccctgacccgtaacgggaaaccaaaccggtcagcagccgccgaggccatccgctcaagggcgtgacggcgaaggccaacacccacagacgaaaggaaaccaccatgacccaggccgagttcaaccagttcatcgagtccacctgctccgcgacgatcgtggatcccgaccgtcctttggtcgatcagggcatcgactccctcggaatgctcaccctcatggtcgctatcgaggacagcctcggcatcgaactggatcccgagtccctcgccgacggtaggggttccacgccctccggtcttctgtcccttgtcgagcagccgaaagcgacggtgtgacgacatgacgacgatggttccttgccgccgtgtggagatgccgcaactgttcgaccacatccccggaagcatctctctctcaggagggctgcccgatctgagcgtgctcccgagcaatcagatcgccgaactgacgtcccggatcatgcgtctcggctcaagaatcctcctgcaatactccaccccttcggtctcgtcctccttggtgccggccatcctggacctggcggaacgaacatgcatgtcaccggatccgcggaatctgatcccgaccgcgggttcccaactgggcctggccatggtgatcaatgcctttgacggcgatgagatcatctgtgactgcgccacctatcccggggcgctggccgccttcgcctctgccggcgtggaaacaacgggggtggccagtgacgaggaggggctcaacccagacgcgctcgctcacgccgtcgcagagggtcgggccaatggccgccgcatcgcagccgtctacaccacgcccaccttccagaatcccaccggctccgtacagtccgagaaccgccgtgcggccctgctcaaggtgtgtgctgacaatgacctcctcctcatcgaggacgatccgtacggcatgctgtccttcgacgggcagacgtggccagctctgaagtccatggacccacagcgcgtcatctacctgggcaccttctcgaaggtgttcgcaccgggcgtccgttccggctggatcgatccgcccgccaatcttgtcgagaaactccgcgctgtgtgcgagatcatgacactctcgccatcagccctcaaccaagcgatcatcggcgagtaccaccgtcgtcacggatgggacgaactgttggagggctatcgcgcctcctaccgcgaccgagcccgtctcctcatcggggctctcgaggctgaactggcaagaacgaattgcactggcacgtggacctggcgtgaaccacggggcggcttctacctgtggttggagaacgtcgccagcaccagcggtatcgacgttgcgcgtcgcgccgccgacaacggagtggccgtggtgcccgggaaacacttcgacgcagccggacacgattcgccgagcctgcgggtgtcgttcagcaattcacgcccggctgatctggtcgaaggagctcgtcgtctcgcccgtgcactggtgggagaggacgttcagaaatgactctcgcgacacgcaccgccaccgacaccctgcagcagaccttgccctggggcacccacgaacgtctcgtcttcgggcgggcgctcctgcgcagcaccggcttcccagccgaaggcttggccctgctcgactccgacgacatcctccccctcctcgactcctttcttgccggggacatcgacagaactcacttcgagaaggaatacaccagtcgcgaggagtccggcgcaagggcgctcatcaacgtcttgaaggacgatgcagtatcgcgcgccatcgcatggcagaaccccaccgcgtggaggtccttcgaatccctgtcgtccacgagcggaatcaatgcttcgactcggcgcaaggtacgccaactcgccctctactggcaacgttactgttccaaggctgagaccattggatacttcggcccgttcgcctgggccgaagtcgacccggaggcctctgcggtcgaattcatctcctccgaccatctgatcgaccgttcccacgtcgcaatggaggcgtgggcggtcattgagatcgggaaagccctggcatcacgggccgaccttcagtggtggatgccaccaatcctgtcccccgccgtcgacctcaacatggagagaggcaccgtgacggtggctggacaccagccacgacgggtccgggaggacgaggcacgagttctcttcctgaccgacggcacccgtcccgccgcccagatcgccaagagcctcgacatggagcccgagcggttgcgcaggatcctcgtggcccatgaacgtcgtcacaccgtgatctgggacgccaacatccctgtctcagtgcacgcgtgggacatcctgcacgaacgcattgcccagatcggagacgctgggctgcgagatgaggccactgctgttctcacgaggttcgacgagcttctggaggtcatccgcaacattcccgacgcccggtccctgacggaggcgacggaatccctgtcccgtcttttcgaaaccgtgacaggaacctcttcgaacagacgtgcgggccaggcatatgcagcccgcagcctgtgctacctggactgcacccgcgccggaaccgccaaggttgggacccggcttctcgaagccctcgacgcccccctcaacctcgtcctacaatccgctgactggttcgcggcgaccttggcaaaggaatacaccaccgaaatcacggacctcgcaaatcgaaagcagcgggcctcccaccagccactgaccatggctgatgtctggccgtccacgatgtcgctgttctggggggactcaccgtccccactgcagcgagccgtgaccgaactgtcacggcggtggagcagagtcctcgaggggctgcagccagtcgacggtcgcatcgacacgacatcgtccgctctctcgggcgccgtggacgagcagttccccgtgtgcaccccgattccagaactgtcagtgcacagcccggacctccaggtcatcacctcgagcactagcaacatcgcctccggacgagtcactgcagtcatgggtgagctacatgcctgtctgagcagtctcgacatgccgttgctcgagtggtcgctgccccatggttccattcgcgatcgcatcaacaccgcgctcaacctgcgacgtctggttcccttgttccccgagacatggaggcgcaacaccggccgcatggttccagcgacggtcggagtgggggatcgcgcaatcgggttcactcggacggccgatcaagaccgtgcgaacacatggtcgatgtcggcactgctgttcgagcagaccgaggacggactcatgatccgtgatcccgatggcaggctctggaccatcgcacaagcgtggagcgtgcccatctccatggtcgccgccgatgcgttcaagatcgggctgcccggctcaccagcccctcggctcaccattgacaatctcgtcgtgttccgtcgtacctggaggtttcccgctggctccatcgacatcatgcacggttcagccgccgagaaacacgctcggctgagggagtggcaggtcacgaatcaccttcctgaccacctcttcgtcaagttcccctccgaacccaagccgatctacttctccttcgagtcccccgccatggccacggtcttcacgcgatcactgcagcgcgacgcccgagagaatccagacagtctcgtgacgatgtccgaagcactgcccgagcctcaatcctcatggctgcacgacacccggagccaccactacgtccacgaattccggctgcaactgaccaaggagcgacatgacgaccacagttgagacacatcccgaaacacgtggcacaaccgcgacatccatctccaatctgatcggtcacacccctctcgtaagaatggaccatctgttcgacggcctccccttcgaggtgtacggcaagctcgagaagctcaatcctggcggaagcatcaaggatcgagcagcacaatccatgatcgaacgggcaattcgacggggtgagatcgtcccgggccgtacgaccgtcatcgagtccagttcgggaaatctcggcatcgccgtggcgatactgtgccaggagcacggcctgaatttcatctgcgtaaccgatgccaaggccacgccaacgaacattcgactcatcgaagcgttcggggccactgttgaggtgatcgaagaacctcatcccgagagtggcgaattcctccccatgaggctcaagagggtaagagaactgctgtcagagattccagatgcatggtggccgaatcagtacgggaaccccgacaatccggcggctcacgagcggactgtccgcgagatcatcgaggcaatcccgcgggttgacacgattgtctgcgcgaccggctcgtgcggaacccttcgcggctgccacgaagcattgcgaaagctgtccccacgcacccgactcgtcgccgtggacgccaagggcagcgccatcttcgacgaggcaggagcaccccatccccgctgtgtcccgggacacggtgcgtcagtgcgaccgccgctgtggcgcgcggggctcgccgaccaactggttctggtctccgacgcggactgcgtcgtgggatgccaggaggccctgcgcaccgaggctcttctcctcggcggatcctcgggagcaattctgacggccattcaccgagtgtctcccacgattcccgctggttccaccgtggtgacgatcctccccgacggcggcgagcgctacatcgacaccatctacagccgctcgtgggtcgactcacacatccccgggctgccctctctcgccgactggggggctcccaaccccgccaattcgtatgacctgaacagaagtgcctcatgaagctctacaccagagagaccgtcgaaactgcgcttgtcgggcgtcatggccaggttctcagtgccgtacagagtgcatacatgctgcattcgacgggagagacatcgctgccattctcaaccttcctccgcccggccgggtatccgaacgatcggatcatcgcacttcccgcccacatcggaggcgacttcgacatagccggtatcaagtggatctcatccttcccggaaaacctcgaccggggccagcaacgagcttcctccgtactcatcctcaatagtctggagacgggatacccgaccgccctgctggagtccagtcagatttcagcaacgcgaacggcagcatcagccgccctggccagcgccaccctccatggctccgaagaccatgtcagcacgattggcatcatcggctgcggaacaatcaatcttgcaacgatcgactacctcttccacgtgcacccccagatcaacgaggtcctctccttcgatctgaggcgggagcgggcccatgagttctcgcacctcgtcaaggcttcgcacccagaggcccgggtccgtgtcgccaaggagcccgacgagattctggccgcaagcaacaccatcgcgatcgccacgaccgactcgagtcattggttggaccttccgccgtggcacgggccggggcaccaagtcgtcctgcacacgtcgctgcgagacctgtcagtgccctcgatcctggcagcggccaacgtcgttgacgatcctgatcacgtctgccgtgaagcgacgtccttggatctggcaactcagcagaccggcaaccgggacttcatcacggggagaatcggagacctccttcttggcgcgccgctgtcctcaagtcctgactcccgtgtcattttctcacccttcgggctcggcatcctcgacctcgcagtcgcctccgtcgtcattgctgccgcctcctcttcagcagtcgagatcaatgggttcgaccccgggaaacacgccacaagcatgattgaggtgaatcgatgaccaccacacagatcaacgacaacacggccgttctgcgcgacgtattccccgccggctccgtcgcattcgtgagcggtgcctcacgcggaattggcgctgcctgcgcgacagcccttgcggccgcgggatgcaacctcgccatcacttatcgaaggaaggagaacgaggcggcacaaatcgccgaatccattgaagccatcgggcgccagtgcatcacaatgcagatggacgtaaccgatgagaaccaagtgaccagagccttccgcatcattcgccagcattacggacgcctggacgccgcggtcttgaactcgggaatcaccagtgacgggcatcttgcaacaatgagccgctccaagtggagctcggtgatcgacacgaatctgaccggaaccttcctctgcacgcgcgaggcgaccaaggccatgtactcgtccggtggctcgatcgtcatggtcgcgtccaccagtggagttgcagggcgaccgggccaggccaactacgcagccagcaagggcggaatcgttgccatgatgaagacgctggccccggaggttgcggcaaagaacgtccgggtgaatgcggtggcacccggcttcattcagaccgacatggtggcggccgttccaaaagcggcactcgcccaggcaatccaacacatccccatgggccgtcttggcctggcacaggaggttgcgtcagccgttaccttcctggcctccccgctcgccgcctacatcacagggaagaccctcactatcgatggcggaatgatcaacggctgaccccaggacccgcacacccccagtaccgagaaagaaacaacaatgaccgagatcacccacactgccaacagcatccgaacccgcgccgaggaacgttccaacaaagcttggcgcctgaaggaggagatcatctccaagctcggtctcgagaccaagccagaatatgtctcggacaaccaaccgctcttcggacgtggccttgagatggattcccttgacactctcgaagtcgtcgtcgccgtcaacaatgagttcggagtctcggtcaacgacgacgacgtacaggcgttcggctcgatcaatgccatggtcgatttcatcgaggtgaacgagaagtgagttctcttgcgctcgaggcgccacccaaggacgcccgtaagaaattcgcctacgacagcgatgccatcaagacgatgctcccacatcgttggccgatgctcatgattgatcgcgcctacgacgtcgtcccagggaaatcgggcaaaggcatcaagtcggtcagcgtcaatgagccgttcttcgccggtcactaccctgaccattccatcatgcccggcgtcatgatcgtcgagtcgatggctcaactcgtggccgtcatctacgtagccgaggccattcagaacaatcccggcatgacgtcgcacgacgcacgttcaagcgttggttatctcggcgcgatccgtcagatgaagttccgacgcctcgtcactccgggcgaccaactcaccctccacgcccagctcggcgagaaagtgggggctctgcgcgaggtttccgtgagagcactcaatggccgggatgtcgtcgcccagggggaactcgtcgtcaccgagcggtgacacccagccacacacgagaaggaagtcccatgatcgttcgcccctacaggccacgtgatgcggaagcgatcgtacatctctacaacagccattccgactcccccaatccagtgtcgggagggattgttgaggaggagttccagagggagctcgaagaacgtggttcgacagtgttcctagtggccgaggaggccggatccattgtcggcacattcgggatgttccgcacgaatggccgacacaccatggccgatgatgaagtcttcgccgacatgttctatgtcaccccgtcacatcgactctcgacagttccgggacagctaatcactgaagccatcagcgagtgcttcatccagggcatcaacgtgatccgcctcaccgtgaaccccgcgaacatctccgcgctcaaggtttacagaaaagtcggttgtgcctgtctcggggccaccgatgcaggcgaggacgggaacattgagctgtacaacttcatccctctggttcttagggcaaccatcaccaaactcgaccacgattgtattcgagccctggcggacatgacttcgttcgcctgcatcaccgagggacgtccacttgatctgtcccacgacttcatcgtggacgctggacggaagatcgtctcccacagcatccagatcgggcgttcaaccatccacgccatggtcgacacgggctcgaggaccattgtggaggccaccctcgacaaccgcgactgggatgctcctcgccagatcgtcgcccccaccccctgtcagaaccggcccgaggaacagcgaggcaaccctgtccggctggtgcacaagaagcttgaggtcaccttcaacgaaggagtcattgagatcagtacgactggccactggggcccggtcctcgcaatgtcctggccctcctccgtctcgcaccgcgctcacgggtggcgacagggccccgccaagtcgtatcgatgcgagcttctcgagaattgcctcgtcctggatgacgaaggaggagtgaaatgcaccatcagcctcaatgattgccaagtcgcgatccggatggatggtgccccaaaaacggaattgagaatgtaccagtggtgcagcctgcgccagggctatctgacggctgacaccggcatcacgagcttcaaccgggcatccagtgggctcggagtcgccgtccgggactcgtccgagattgtcgccgcgggccttcccgccatccccgacccacccatcacatggagtgagggtgacatcacggttcagctcgatccctgcggccgcgcctccctgatccactcgaccctggtggaccgaagaatccacttggacgagtctggctcggcaagtctcaccatgaccgtgtttggtgattcccagccccatcgtgccgacaccgtcgagctgcctcccctcgcggcaggcaccgacaggatcgtcctcaagccggctgccggaggcgtgaccacatggcgcttgggcgccaccaaggtgctcaagtcaccgtggccacacgcccgcgcgctcgggcccaatccgatctggcgagccggcctgtgggtcagtcacgagccggatcgccacgaccgtcgccaaggaatggggtggggtcccgatcatcgcagttggaccctgtcggaagacaccatgaccagtactgacgggacactctcctggcgcttcagcggctcccccgacaccggctggacggtcgacgtcacgacgagcaacacgcacggggagaccgtcgtctggctcaccccggactgcccggcgggcgagaggatccgcacgtctgatcatgccgtgacgaccatgcttgacatctcgaagccatggcagcgctggaccacccgatgcgcaattcctctcagacacgggaagtggttcctcatcgagcctgatcatgacctcactgattcccccgaaatcctcatgcgctctgttcacggggtcctgctcgtcggctgtgtcggacgagcccactccggatccgcttcctggcgctttgccatcacgtcagaactccccacctccaacccaagaagaaacgactacacctcagccgcctgaacccaaccagttggaacacccactacagaagaaatggagcaccaccatgtccatcactgagcagtacaagacccttcgcacctcggtcggcctccacacgcctaccggtcccctggtccgtatcaccggtgatgatcgtctcgagtttctcgacaccttcctgtcccgcgcctcggacttcgtggaccccgacaccactcgggagtgcctcgctctcaccgaggacggccttccgctgacgatcttcctccacatcgagcgcgaggaggagtcatggctccttccccgcaccgccatcgatgcggcgaccctcgccacgtacctcggcaacctcgagaccgatggtgacctgtcaatcgagattgctccagagggttggggagctgtcgctgtcgaggggccgctgtcgtggcagatcgccgaaaaccttctcgacttcgacgtggctggcctcgttcttcacgccgtcacggacgtcgtcgttcccggggcccccgagggatcgaaggcatggctcgcccgggtcggaaccactggagagtacggctacctgctcgtctccaacgttcccgacctcgcccgcacttatctcctcagccgcgccacggagctgggcggtcaggcagtcgacgccgatgctctcgcacgagtccaggccgaggccgggatgccctattacgcgatgggcgtgtgccacctcgatgtcgccgggggtgacctcgcctggctcgtggactggcagcgcatcggcgagttccaaggatccgagaatctgcccacacccgtccgagaccagcgccgactggccgccatcgccctgcccaccggcaaccgcccggaagctggtcagaccgtcgctgccggggatgaggagattggaatggtggtgtacgtcaccccgtccgccaatcccgatgaggaactcgcgttcgcacttctggatgctcctttctggactcccacccttccgttgaccgtcggtgcccacgacgggaccacggtcaccctgccccgcgtcgtggcagcctccagcctcaacaagctggggtgacagcgatgacgatcactgctgagaacgccaccacccgcagcgacattgcccggagcattgcggtgaccggcgtgggactggtcacggcacagggtgaccataccgacgagtgctggaccgaacttgtcgatggggtttgcggaatcaccatgaacgtcacgttcgatgactctggcaccacgattccgtgtgctggcgtggctcccattccgaactctgattcgatcgaccgctgttacctgctcggcgtccatgccatgcgtgaagctctcgagatgagtggcatcgacctggactccgtgggtcgtgatcgcatcggactcgtggtgggctcaagcctcggcgcgatgcccaccttggaggcggctcatcgccgggccattgagaccggcgtgctcgatgccggattggcggcagactcccagctccactgcgtcgccgaccacctcgccgctgagttcgacatccgtggaccccgcgtcgtgacatcgaatgcgtgtgccgctggtgccgtggcgatcggctacgccgcagaactcctctggtccgacgatgtggacctggtcgtctgtggcggtgtcgatccactggcccagatctctgccaatgggttcacgtgcctgggagctctcgacaatctcccatgcagcccgatggccggttcctccggtctgactctgggcgagggagccgggttcatggtcctcgagagaacagatgcggcggctgccagaggccaggaggtgatggccgaaatcgccggctacggcacaagttgtgatggttaccaccagactgccccggacccgggtggcaatggcgcccgcagctcaatggaggccgccctgcgctcagctcatctcaagccgtccgacgtcagctacgtcaatctccacggcaccggtactccgaccaacgacgccgtcgagccgaaggcactccggtcattgttcaagtccgatgaccttccccctgtcagttcggtgaagggcgccatcggtcacactctcggcgctgctggcgccatcgaggccgtgtgctcgatcaaggccatccacgagggggtcctgccgccaaccgtcaacaaccgcgggcaggcttcccgaactggtctcgacatcgtgccggagtgcgcacgcaaggccgctcccgacgtggtcatctccaactccttcgccttcgggggcaacaacgcatcagtggtcatcaccgcacctcgaggaggcgttcactgtaccgccccggcgcagcttcgcgaggtcggaatctcaggaatggcagctctggcgggaaaggccgccaactcggaggagcttctttcggccctgtcagaagattgtccaatctggatggccgatgagaagacctgggaaggggatgctgtccaaaccggccatgtggacatcaagcgcctgtcccgcacaatcaacccgtccaaggttcgtcggatggaccccttgggaatcatctccagcgcggtggtgactgatctgtatgcccgacacgggaagctgagccgcaaggatgccgaaagcacgggaatcatcttcgcaaccggctacggtcctgtgacggcggtgacgcagttcaatgacgggatcatccgccacggttccgagggtgccaacgccctggtgttcccgaacaccgtggtcaacgcagccgcaggccacctcgcgatgctgaatcgctaccgtggttacacggccaccttggcatgcggtggaaccagttcactcatggcgctgcttctcgctgctcgcgtcgttggccgcggcgctgcggatcgcatcatggtcgttatcgctgacgagtttcccagcattgccgtccaggccgtcgcgaagcttcctggctaccgacacagggttgatggttccggagccgtgctctcggaaggcgcggtatgcgtcctggtggaggccgtcgaagtcgccgaagcacgcggtaccgcccccatggcgctgctacgcggcttcggatcccgtggagagtccgtgggagtcggtcacaccgcatccgatggacgggcttgggccaaggccatggccgctgcactgggcccggccggcctgactgcctccgacgtgtcgaccgtcgtggcggcatcaagcggacatcctcgcgtcgaccgagccgagcaggcggccaggcggatcgtcggactgtccgcaaccgctacgaccttcccaaaggcgattgtcggagaaacacacggatcggctgccgggatcgggctgttcggtgccctgtgcggttcgaggtcagccgcgcaccagaacatccttgtcaacgccttttcccacggcggtggttatgcctcgatggtggtggagtcactgtgaccacgacgcttctgccacgggttgcccagccgggaccgggcgtcagccatgtcgacaccgaccgtcccatcgagtgcatcatcacccaccacccccacatgccgcgtgatcgcggaggccacgccacctccgtgtcaggcaggtacttgctgcgccaagccgcagaactcatgctcggcacggatcctgcgcattgccccgtcgtcgacccttcgcggcgctggtactggcccggaatcaatcttcacggttctgtctcccatgtcccgggctggagcctgacgacgctgagcaccggcggccacatcggggcagacatccaggacttccgggagcgtcccggcgcaatggcattcatcggtgacctggtcaagctgtcgcgatcggcgtcactccgagaattcgcggagtgcgaggccgtcgtcaaggtgtccgaattgactaaggagacgttcgggcacgtgcgactgcccgaatggacacccggatggcgccacgttttcgaggactactgggtctggagtctcgagatgcacgggatgggagtcatcgcactcgcatccgatctcccccgagccattcgctggtggcggtgcgacgccgatgcccgtggccgtctccaggctctccgacccataagcagtcttggaccaggaaggccgtcatgagccggtactcacgtcgaatctcaggcatcgaacgcggctatctcaacgccgcaacccggggcccgcaccccaccatccacacgatgatcgacttcgagggccgcgtccccgccgactgttggcggcacgcatccacgattgcgtcggccgccaaccctggcatgacagtggtccggaggtcgggccgatggacatccgatccagcgggctgtccggttgtgttccacgactggaccgcggaccccaacgacgttgccgacttccacgctgacatggatctcgtgacgggaccatcgtccacgctccacgttttcgagggggcggaacgcacccgaatcaccttggcagcaagccatgccgtgaccgatgggcggggcatcgaacgatttctcgtcgacctgcttgcagcgttggacgagcgtgaacccattggaagccccgacaccctgaccgatgtcgatatcaaacgatccttggagaacagcatcaagccccgacgccacctggccgctgtgcccgccgatgtcctttctccactgggggggaggaagaaccaacgtatatgggcctccaggacgtggcacagtgccccgggagccatgagcggaagaatcgctgccgctgtggccgagatgatcgaccacgccgcaatgatcatcatcccggttgacatccggcggcacgtcccagaggtccgatccacagcaaacctaagtgcccaactgccagtgatcatcaccccgaaccagcgctggcaaagcatccatgggcatctgctcacggaccttgctcgccatcgagaccttgcgatcatcagtgaggatttccgccacaacaatccgttcgcatcgaccttggaggaaagccaggccatcggcctcgatggtgtctatccctgtgccgcaatcatctccgaccacgggaagctcgacctttcaaggttccagaccttggaactcaccccggtctcgatgcgaagcctcccgatgctcgttccctactccgcaatgttcatcagcagttgcaccgtcggcgagaccaccactgtcaccatcgctcatcgcgctgatgacgatcccgattccataaacaccttcttccaccacatcgaatcccagatgtccatctgagccacgtcgtccctggagagcaaacatgaccacccaaaatgtcaccaccccgccgcgccccgtcacctcccatgccacggcgaccaggtccgaggctccaccgcgaagcgtcatcagagccatggccatctcgatggtcgcgaccctcatggtcatgctcgacacgaccgtcgtgaacgtgtccttgagcgcgaccaccgcccgcttcgggagcatgggcagcgtgcagtgggtcctcacaagttacctacttgcactgtgcgcgacgatgacggcctccgcctgggtcatcgaccgccttggtccacggctcaccttcatcgcctcaatgaccatgttcctcatcggctcggtgatgtgtgcactgagcgattcagtgtggcaactcgtcactggcaggaccatctccggtgccggagctgggatccttgttccgacagcatccgtcctgcttatccgtggcatcccacgcgaacaacttggcagggtgcaggcactgaatgggagtgtccagttgatcgctcccctgatcggcccgactgtgggcggtctcctcgttgacaggtgcgggggctggccggccatctactgggcgaacgtccccgtagctcttgttcttctgattgaggccgtccgcgtcgatccggacgaaccacacaccgctaagcgccgcctcgatgctctcggcctggtctgtggcagcaccgcgatcgtgctgacagtgcttggtgtctcactcttcggcaggacgtcgcgaaacaccaccttcctgcttacgatcggcgcgcttgcagtcctcgcatgggcgttcttcatcacccacatccgaagggctaccaaccctctgcttgacgtttccctgtatcagaaccctgtctattcatggtccagcttcaacgtagcggtgcttggtttcggtctctacgcccccatggtcgtcatgcccctctatctcgaggcgacgcgccacctcactgccgtccacactggtctggtgatgtcagtggccggcgtcggcgtcattatggccggaatcctgtgcacgaagatcatgggccggatcggtggaggcctcacgatgacagttggcataactctgagcatcatcgccactctgcccctggtccggctgacgaaccacacctcctacatactcctggcagtctgcttggccttgcgtggagcaggaatcagcctgacaatcgtcccagccatgacacgggccttcgagtccatcaagaggacggccatggcggacgcctctgcacagctcaacctgttgcagcgaatcggcgggacaattgcgacagcagtcatcatcgcagttatccaccacgaggccatgctcacccgcggactctcccccacagtgttctcgcacgccaacgtgtggatcctcaccgcgaccgccgtcacccttctgccggccttcgcgcttgcgaaggccgaaagacaacagcaggatctctgagcaccgaggagtactccctcgtagaccctcctctgatctaattgggttcgttccaagtgtgtatctcactccggggagccccgattgctgaaccacatcccgttcaccctggcgagtccctcgtggtacgacgtcccctgggcgcccggatctccgtatctcacaggagatatctcggtcctgccagcggactcgccaaggtggacgacgaccatccggggtccttggcaaatccacatgccacctcgtccgacccttccagaggtggggtggaaagtgcatgtgtctgccaagccatcggaattggaatcggttgcctcagtcgtagcactgtggtgcgtacgccacagcgtccccttcaaagtacttcgcacccgaggtctcgttcacgcgagtcaagtcaagtatgcggaccgaagtcagagcggcaaggtctgcacctgctaccccgacggcgagagccttgagcacttctgctccggtcttgccgagctgcttcagaacgtcgattcacctccggtgtccggcgagctgcgagtcggatcctcccctctgtggttgcgtcacgggagtttccgagaggcatgggcggtgtcatccacaggagtaccgttcccggtctacccgggaacaacacatcctgatcgtcgaggccccgcgcccgcagaatccgatcacgacacgccgtggatccggaggctccgtcggacgaatcgccccagcacggttcttcccatcgacgatgtcagactcctccaccgatcaaatgctggcggcgtgtatcaggcaacatggagagacggcacatcggtagtcgtcaaggaggcccggcacctgtccggacttgatgcggcgggggtcgacgcccgagtgcggctgcgtcacgagtacgaggccctgagaagactggacccctatcgggccgctccccatcccattgatctcattgagaccgaggacggctcgttcctgatcatggaattccttgacggaatgacagtccaccaggagatgtcgaggttccatcctctgattagtaggcgacctcatcggctatcgatgaccgatttttcacgctggtgccgagaggtcgaagatcgcttgaggaatgtcacgagggtcatggccgggtgcggaatcgttcacggggatcttcatcccgcgaatctgatacatgtcggccatgaggttttggttactgactttgaatcctgctcaatcgacggggtcgccgtctcgtcagggatcgccgctccctggttccagtcggacgacacgattcccgatccggcgacgactgacgatctccacactcttctcgtggatccgacttgcggccccgcgcttgtcccccatccaaatcttcgcgcgctcatcagccaggccgcagtcgaggacatgatgggaaatccgactggtttaccacatgcctggaacctcgaggacatgacaagcgaactcgccaaggggatccgggcatcagccactcccgcacgagccgaccgcctctttccctcagacccctacctgttcgggcatccaggttcagaattcggcctgatgcatggcgccgccggaatcatggctgctcttgccgtgactgggtacggtgttgacgcgaatcacgtgacctggatgaaggaccgcttggccacccgcccgaccctgctgccggggttggccaacggaatcgagggaattgccctgggtctctccctgtgcggtcagaacgacatggctgcatccctgctccaccagtccggaattctcacgatcacaacgaacggatcgactgacctcaccctcggtactggtatggcgggccgagcgtgcgcgctgcagtccctctcacaacgactgtcatcgaaatctctcgcccacgctgcatataccctctgggaacaactcgccgtggctatgcggaacactgatgtggccttgccgaacggcctgttctccggttgggagggaatcgggctctccctgcttgcctctcccctgccggatcgtcatgatctcgcccgccactcactccgactggccctggccacgacaacgattgttgacggtgcgctcttctcaggcgagggacagatccgatggccatatctggggcgtggtcccgcggcatgtggcccgctcgccgccaggcttgatgatgaccagacggccaaggccgtggcacagacctgtcgttgtcccctgactgagtcatccggtctccacaatggccgcgcaggtctcctactcgtcctccgccagctcgtgggagaccaagacgacgccgttcgccgccacctcatgagactgtcgtggtcgatggaccgtcgcgaggaaggcacattgctgctgggtgatcatggcctgcgtttctcatccgatctcgcgacggggtcagccggcgccctcctcgccctgagcagggacccatggcggaacatgacacgaatgctcggaatatgcgatgacacctgtcatggcccactagtgacagtttgatctagcgccgatagttcacaactgaaagactccaaacatcgaggaaaacatgctgagccaaaacgccttggcaggcgtggctcgtttcaccacgatgaacaccaggagacagaatgtccgttgaggccatgcaatccatcgagatggacgaggaaaacagcgccagccagacagtttgcgcttgttacagcttcttctcgtggtcaggatgctgcgtagtctcccaagcggtggaagcatcttgatcgtgtgagacaccgtcgactaccctgtcccccgtggtacgcacacgccccgtcctggacagtcccggaagaccgctcatcgcctccggagtcgtcctggcggtcctgctcatcatcgcggtgatgacgatggtgcttcagcgcgaccccactctcacccccggacgccgcattctcggtatcgtcctgtccacggtccaggccgtcggattcatgtggctgcagacccgcatggttcgtcacggcaagggttcgcgcaacatgcgtgcgacccttggaagggtcggtttctgggccacgtggggactcgtcgcagtgggagtcgtcaatctgtggctgaccaactcgtggaccctcttcggggcctccgtcgccacgcccctccttctcctgccaggggtgtggagtgtggtggccaccctcgtgaccctgatcgtcggtttctccgacctcgtggtcacccacacctcgccactgacctcagccacggtcgtgctggtgaccatcgcggtgtcggtgaacctctacgcattcacgaagctgtcgacggcactcgttgaactccgctcctcccaggaggagatcgcccggctgcgcgtggacgccgagcgtcaccggatatcgcgggacctccacgacatcatcggtcgcaccctggtcgccacgtcgatgcgccagcaggcggccctccacctcgtcgaccgcgacccgcaacgggccaaggaacagctcgacgccgcccatgacgcaatcaccgaggggcagcaccagttgcgttccatcatccaggccgagatgagcaccagcctccccgacgagatcagcgacgccacattcctgtgcgaccgactccacatcgacttccgcatggatgaccgcggcagaccgcacaaacccttcgactcggcggcggcggcggccctgcgcgagggaatcacgaacatgctcaagcacagcgcggcgggctactgccacgtcgccatctccccggacctcctgaccgtcaccaacgacggttgtccgcaatcacctcgcccctccaccacaccgggcaccggaatcgaccatctccggtcccagatcgaggcgctcggtgggtcggtgacgacgtcgcggccctcgcggggcaccttccggctccgctgctccttcccgacccggggggcgtccacgaccacacccgcgaccgaaggaggacgatgacgacgagaatcctcctcgccgaggacatcaaactggtggcagaggccttcgaggcactgctctcggtggaaccggagttcgaggtcgtcgcacgggtggcacgcggcgacgacctggtcacatccgccacccgcctgttccccgacgtgatcctggccgacatcgacatgcccgggatgaccggcatcgaggccacccgaatgcttcgcgacaagggataccgcggcagaatcatcctgctcaccgccctgccgggaagcgggcacctgcacgccgcgatggctgccggagccgacgggtacctgctcaagtcgatcaccgcgccctccctcatcaacgccatccgggcggtgtgcaacggccagtcggccatcgacccgaacgtcgccgcggtcgccatgcgcaagggaccctcgcccctcaacgaccgggaaaccgagattctgcgcctagtcgccgacggttcctccaccgcgcagatcgcctcgcggctgtacctcagcaagggcaccgtcaggaactacctgtcgacggcgatgtcgaagctcgacgccgactcacgcacagcggcggtcacgcgggcacgcgaggagggctggctgtagcaggcgacccgctcagcccaccgcccctcagcccgccgactcctgacgcacggcctcctcgaccgcccggctgagcagggacccggccctgaccatcgacgtctccgggtccggctcgagatcggacaacgcgatgatccggtcgaacgcggaccgtttctcctcgggcaggtcacagcgtccgcacaccgcccagacgggcaccccggcgtcccgggcgatcttgcggatggtgtcgggaagcttgccgagcagggtctgctggtccagccgcccctcccccgtgacgacgagactggaggcggagatccgcgacaccgcgcgggaccatcccaggacgaccgccgcgcccgggcggtacctggtccccaggcacatcagcgcccagccgacccggctgggcggctgcgaaccccctggccaccgcccggcaggcctttcccgaactcagcgaccccttgaaggagtcgacggcaacgatgaccggcgcattcggatcaggacgcatgggatcagcatgtcacgtcgatacggagcagtcgcgccgcctacccctagactcgggggcatggtcaaccgagtctacctgtccctgagcgttctcgccctcgtgctgtgggtggtcgcctaccgtcacatgccgggctgggccgcgggcatcaccctggtgggcatcgtcgtgctgtcgctgtggtgcgagtggtcgcgggtgcgcaccctggccaggatcggcaagtcccgccagcagggcccccgctcctcccgaggacgcaacctgtcgtgagcaatacgattcccgcagccctccaccccggccctgacgaggcc

SEQ ID NO: 429 - DNA, 26620 bp, Propionibacterium acnes
ccttgtggacaccacgtcatccacatgacttgtgtcacatgattcccggaccatcatcaagcagatgctcacccaactgtaatgatttctgttctgaatctggacatgctctgacctgcattcaatgatcaattccgtgcgatattccacaacgcacggggaggtcgcagacaatgacaacagaaagcatccccacgcggctgctcgtgtggcacgagcagaccgatccgaccaagctcctcaggatcaccgacgcgatcaggaggggggatccccttccccccatcgaggccatggcgatcggccacagattcctcgtcctcgacggtgcgcaccgggcccaagcccaccagtactgccatcgatctgagatccgagcccgcctccacaacctccccctcagcgcggaaataccaggctggagccactccataccccgcgatgcagcagcgaaactggctcacctactcctccccgtggacgctctcggtcaggcggaaatcgtcctgcacggggtgcgccgtcaggtggggaccgcttcacaacgaccgcgcgacatctttctcgcctgccaccggatcgcgcgagttgcctacgcgcatggaatcagacctctcggcccggagttctccaacgctccgacgatcgacgccgccaccatgacctggcgcccgccgaacgtgggcacgttgtgggccatcgccagcagtctcggacccctgcccgcaactgtgacccggttcgccccgatcctccggcacgacgccatcggggattccgcgatgacacccgtcacctccgccgcgtgacgacccgcgccaattccgccccaccactggatgaggggcagccgcgtggacgatgctcctgttcaggcagggactccatacgagaccaataggaaaatcatgatcaaaaacacaagccctctgaccgtgaaaaatgtctcgaaaacattccgtggctccagcggagaagccatcaaggccgtgcaagacgtgtcattcaccgttgagcgtggtgaggttgtggcattcctcggcccgaacggcgccgggaagtccaccaccatcgacatggctctcggcctcacccgccccgacagcggccagatcgaggtcttcggtactgacccgctcagcgcggcccggtcgggacgctgcaccgcgatgacacagaccggcgggttgctgcccgacctcacgattgggcagaccatggagatcatctcctcgctctatcgtggctcccacatgaatgcctgcatggagcgagcaaggatcacgcatctggccgatcggcaggtgtcgatgtgctcgggaggcgagcgccaacgacttcgcttcgcactggctctgctgcccgatcctgacttcctcatcctcgacgagcccactgcggggatggatgtggaggcgcgccgggacttctgggcagagatccacgaggacacgcgtcgtggtcggacaattctgttcgcaacgcactacctcgacgaggtggacgagttcgccgatcgggtcatcctcatcaaggagggccgcgtcatcgccgacgacacctccgacgcgatccgcaccatgtcggggggttgcaccgttacggcgaccattcccgacttctccctggcacgactgaatctgccgggcacccaactcatcaagcagggcggcgcacgcgttgatctgcaccatcccgattccgatgccctcgcagcgcgagtcatccagctcggcggcaccgacctgcgcgtggtcccccgcagcctcgacgacgccttcctcgctctcacctcaaccaccaaggagtcctgacatgaccgcccaagcgcttcccgcagtcgccactcccaaggcccgccaccgatccgccatctcgctgaagtacttgtggtgcgagatgcgtcgccccttccggcgttcgacgatgctgttcaacctcgccctccccgcagttctgtacctggccctgttccgcaccgtccacaccgccgagctgccggacgggaacttcgcgatgtggatgatgatcggcatcgctgtctacggagcggccactgcgagcaccagctacgcagcctccatctccgtcgacgaggccaacgggtggacccgcaccatccgcctgacgccgttgtcgtcggtcgggtacgtgctggtgaaggtcctctgcgccatggccatcgccctggccccgaccctgctcatcggtctcatcgggctgttgaccggagctcacggcacgctgcgggtctgggtaatcggactgggggcggcttggctcagctcagcaatcttctccgccttcggcctggctctcggactgtccctgcgtcccgaggtcgtcatgcacgtccccggcctggtcatcaccggtctggcgttcctgggcaacgtcttcgtccccctcagcgggacgatgctcaccattggccgctggagccccgcctacggcatcaccgcgctggctcgttacccgctcaccaacggcatcgacatcgggggcggccacgactccctgacggctgccctcatcggcaccttctgctggttcgccggattcgtgttctgggcctcccgtcgatttaccaagagcacgggtcgtcagtgacagattcggccgatctccggaaggagcagtgttatgaccaagcccctcattgcagtggtcaccgcgggccaaggagcgcagaagcctcgcctgctcacgccatggctcaaggtccccggcgtcacggagaagcttgctgcatggtccgctcaggccgatgtggacctcgtcgagctcggtaccagggcgaatgcagaaaccttggcagcgaccgagaatgcgcagccactactggtctgtctcggagtcctcgtctcggatctcctggccgaccagaacattgtgctcgcaggacactccgtgggcgagctgacagcagcgtgtctcgccggggtagttgatcccgggacggccgtcactcttgcacgacggcgtggactggccatggcgcgggcctgcgctctccacccgaccaccatggcggccatcattggtgacaatccggatgacgtcctccggcggctctcggaactgggactcacggctgccaacatcaacggaggcggacagattgttgcggccggctccaccgacgcgatcgcggaactggtggcgacccctcccaacgggaccgcagtcaagccgttgcgagttgctggcgcctttcacaccaagtacatgacgcctgcgcaggacgctttcgcccaagctgctcaagacgtcaccttctccgacccgcagcacccgatcatctccaacctcgacgggcaggagatccggtccggcaatgacctgcgtgaacggctgattgcccaggtgaccgcgccagttcgatgggatctctgcatccagcagatcgcggatcgtcagccggaactcgccctatcggcccctccggggaaggtgcaggcgtcgctcttgtctcggcagatcccggacctcgcgacggtctgcatcaccacaccacgggaggcagcccaggctgcacagcggatcgaccagtccgtatccgtccttcagggggcatgatgctcatccccgagtacttcctcacagcctgttcggaccatgctgagcgcctggcgatcatcacccacaatgacgttgtgacgtgggccgaactggcgactcgcgtcgacggttttcggcgctggctgcgggaccatggcgtgcaccgccaggacagggtcgttctccagacgccaagcaccgtaggcacggtagccctcatgtgggcctgcctgctcgacggcgtgacgatggtcccggtgcaccaggacctcactgcctcccaggtgcagcaagtcatcgacgactgccgtccagctctggtgtgtggcagcccggacctcgtccaactcctcaactcccccggaatgaagacaagcacacctccaacgcggccggagtcaacgagtattctgccgtccttgtcccgggtcagccccgatgaccttgcgatgctcatctatacgtccggcacgacgggtctcccgaaggggatcatgtgtccccaccggcaggtcgccaccgccgcacggatcgtccatgactgtctcgggtaccgcacggacgacgtcattctctgtcgcctgccgttgtccttcgactacgggctctatcagattctgatgtctgccatctccggtagcgcggttgtcctgcgggacggaggcgcgcaggaccgcaacctggtgcgcgacatcgcccgtcacggcgtcactgtcgttccagtcgtgccgtccatggcgtcaatgctcatcaccctgcagcgtcgtgatcagttgccgaccatcgtcagactgttcacgaataccggggcgcgtctggcacccgagaccgcgaaccagttgctcgcaagcttccccggctcccgctatgcgtcgatgtatggcatgacggagtgcaagcgcatctccatccttccggtggaggagtacgagacgcatccggacagcgtgggaagagctctgcccagcactcacgtcgagatcgttgacgctcagggagttccggttccggcgggcgagcacggggagatcacggtgtccggcccgaccgtgatgaacggctactggcaggtgccgaacagtcccagtggacgattccgacccagcggccacggcctcactctgttcaccggtgatcgcggctggatggatgaggagggacgtctctacctcctcgggcgcgacgacgagatcgtcaagcatcacggcatccgaatcagcctgcaggagatcgagatagccgccgaagccgcgccgggcgtcgacgcagtcatcgctctcaagccggcctccgactcggcccccattgaaatcgcctactgcggcagcacgagtcccgagaacctggcccgccatctcgaaaccgtcctggaccgggcgcgacgaccccaattcatccaccaactccagcagatccccctgacccgtaacgggaaaccaaaccggtcagcagccgccgaggccatccgctcaagggcgtgacggcgaaggccaacacccacagacgaaaggaaaccaccatgacccaggccgagttcaaccagttcatcgagtccacctgctccgcgacgatcgtggatcccgaccgtcctttggtcgatcagggcatcgactccctcggaatgctcaccctcatggtcgctatcgaggacagcctcggcatcgaactggatcccgagtccctcgccgacggtaggggttccacgccctccggtcttctgtcccttgtcgagcagccgaaagcgacggtgtgacgacatgacgacgatggttccttgccgccgtgtggagatgccgcaactgttcgaccacatccccggaagcatctctctctcaggagggctgcccgatctgagcgtgctcccgagcaatcagatcgccgaactgacgtcccggatcatgcgtctcggctcaagaatcctcctgcaatactccaccccttcggtctcgtcctccttggtgccggccatcctggacctggcggaacgaacatgcatgtcaccggatccgcggaatctgatcccgaccgcgggttcccaactgggcctggccatggtgatcaatgcctttgacggcgatgagatcatctgtgactgcgccacctatcccggggcgctggccgccttcgcctctgccggcgtggaaacaacgggggtggccagtgacgaggaggggctcaacccagacgcgctcgctcacgccgtcgcagagggtcgggccaatggccgccgcatcgcagccgtctacaccacgcccaccttccagaatcccaccggctccgtacagtccgagaaccgccgtgcggccctgctcaaggtgtgtgctgacaatgacctcctcctcatcgaggacgatccgtacggcatgctgtccttcgacgggcagacgtggccagctctgaagtccatggacccacagcgcgtcatctacctgggcaccttctcgaaggtgttcgcaccgggcgtccgttccggctggatcgatccgcccgccaatcttgtcgagaaactccgcgctgtgtgcgagatcatgacactctcgccatcagccctcaaccaagcgatcatcggcgagtaccaccgtcgtcacggatgggacgaactgttggagggctatcgcgcctcctaccgcgaccgagcccgtctcctcatcggggctctcgaggctgaactggcaagaacgaattgcactggcacgtggacctggcgtgaaccacggggcggcttctacctgtggttggagaacgtcgccagcaccagcggtatcgacgttgcgcgtcgcgccgccgacaacggagtggccgtggtgcccgggaaacacttcgacgcagccggacacgattcgccgagcctgcgggtgtcgttcagcaattcacgcccggctgatctggtcgaaggagctcgtcgtctcgcccgtgcactggtgggagaggacgttcagaaatgactctcgcgacacgcaccgccaccgacaccctgcagcagaccttgccctggggcacccacgaacgtctcgtcttcgggcgggcgctcctgcgcagcaccggcttcccagccgaaggcttggccctgctcgactccgacgacatcctccccctcctcgactcctttcttgccggggacatcgacagaactcacttcgagaaggaatacaccagtcgcgaggagtccggcgcaagggcgctcatcaacgtcttgaaggacgatgcagtatcgcgcgccatcgcatggcagaaccccaccgcgtggaggtccttcgaatccctgtcgtccacgagcggaatcaatgcttcgactcggcgcaaggtacgccaactcgccctctactggcaacgttactgttccaaggctgagaccattggatacttcggcccgttcgcctgggccgaagtcgacccggaggcctctgcggtcgaattcatctcctccgaccatctgatcgaccgttcccacgtcgcaatggaggcgtgggcggtcattgagatcgggaaagccctggcatcacgggccgaccttcagtggtggatgccaccaatcctgtcccccgccgtcgacctcaacatggagagaggcaccgtgacggtggctggacaccagccacgacgggtccgggaggacgaggcacgagttctcttcctgaccgacggcacccgtcccgccgcccagatcgccaagagcctcgacatggagcccgagcggttgcgcaggatcctcgtggcccatgaacgtcgtcacaccgtgatctgggacgccaacatccctgtctcagtgcacgcgtgggacatcctgcacgaacgcattgcccagatcggagacgctgggctgcgagatgaggccactgctgttctcacgaggttcgacgagcttctggaggtcatccgcaacattcccgacgcccggtccccgacggaggcgacggaatccctgtcccgtcttttcgaaaccgtgacaggaacctcttcgaacagacgtgcgggccaggcatatgcagcccgcagcctgtgctacctggactgcacccgcgccggaaccgccaaggttgggacccggcttctcgaagccctcgacgcccccctcaacctcgtcctacaatccgctgactggttcgcggcgaccttggcaaaggaatacaccaccgaaatcacggacctcgcaaatcgaaagcagcgggcctcccaccagccactgaccatggctgatgtctggccgtccacgatgtcgctgttctggggggactcaccgcccccactgcagcgagccgtgaccgaactgtcacggcggtggagcagagtcctcgaggggctgcagccagtcgacggtcgcatcgacacgacatcgtccgctctctcgggcgccgtggacgagcagttccccgtgtgcaccccgattccagaactgtcagtgcacagcccggacctccaggtcatcacctcgagcactagcaacatcgcctccggacgagtcactgcagtcatgggtgagctacatgcctgtctgagcagtctcgacatgccgttgctcgagtggtcgctgccccatggttccattcgcgatcgcatcaacaccgcgctcaacctgcgacgtctggttcccttgttccccgagacatggaggcgcaacaccggccgcatggttccagcgacggtcggagtgggggatcgcgcaatcgggttcactcggacggccgatcaagaccgtgcgaacacatggtcgatgtcggcactgctgttcgagcagaccgaggacggactcatgatccgtgatcccgatggcaggctctggaccatcgcacaagcgtggagcgtgcccatctccatggtcgccgccgatgcgttcaagatcgggctgcccggctcaccagcccctcggctcaccattgacaatctcgtcgtgttccgtcgtacctggaggtttcccgctggctccatcgacatcatgcacggttcagccgccgagaaacacgctcggctgagggagtggcaggtcacgaatcaccttcctgaccacctcttcgtcaagttcccctccgaacccaagccgatctacttctccttcgagtcccccgccatggccacggtcttcacgcgatcactgcagcgcgacgcccgagagaatccagacagtctcgtgacgatgtccgaagcactgcccgagcctcaatcctcatggctgcacgacacccggagccaccactacgtccacgaattccggctgcaactgaccaaggagcgacatgacgaccacagttgagacacatcccgaaacacgtggcacaaccgcgacatccatctccaatctgatcggtcacacccctctcgtaagaatggaccatctgttcgacggcctccccttcgaggtgtacggcaagctcgagaagctcaatcctggcggaagcatcaaggatcgagcagcacaatccatgatcgaacgggcaattcgacggggtgagatcgtcccgggccgtacgaccgtcatcgagtccagttcgggaaatctcggcatcgccgtggcgatactgtgccaggagcacggcctgaatttcatctgcgtaaccgatgccaaggccacgccaacgaacattcgactcatcgaagcgttcggggccactgttgaggtgatcgaagaacctcatcccgagagtggcgaattcctccccatgaggctcaagagggtaagagaactgctgtcagagattccagatgcatggtggccgaatcagtacgggaaccccgacaatccggcggctcacgagcggactgtccgcgagatcatcgaggcaatcccgcgggttgacacgattgtctgcgcgaccggctcgtgcggaacccttcgcggctgccacgaagcattgcgaaagctgtccccacgcacccgactcgtcgccgtggacgccaagggcagcgccatcttcgacgaggcaggagcaccccatccccgctgtgtcccgggacacggtgcgtcagtgcgaccgccgctgtggcgcgcggggctcgccgaccaactggttctggtctccgacgcggactgcgtcgtgggatgccaggaggccctgcgcaccgaggctcttctcctcggcggatcctcgggagcaattctgacggccattcaccgagtgtctcccacgattcccgctggttccaccgtggtgacgatcctccccgacggcggcgagcgctacatcgacaccatctacagccgctcgtgggtcgactcacacatccccgggctgccctctctcgccgactggggggctcccaaccccgccaattcgtatgacctgaacagaagtgcctcatgaagctctacaccagagagaccgtcgaaactgcgcttgtcgggcgtcatggccaggttctcagtgccgtacagagtgcatacatgctgcattcgacgggagagacatcgctgccattctcaaccttcctccgcccggccgggtatccgaacgatcggatcatcgcacttcccgcccacatcggaggcgacttcgacatagccggtatcaagtggatctcatccttcccggaaaacctcgaccggggccagcaacgagcttcctccgtactcatcctcaatagtctggagacgggatacccgaccgccctgctggagtccagtcagatttcagcaacgcgaacggcagcatcagccgccctggccagcgccaccctccatggctccgaagaccatgtcagcacgattggcatcatcggctgcggaacaatcaatcttgcaacgatcgactacctcttccacgtgcacccccagatcaacgaggtcctctccttcgatctgaggcgggagcgggcccatgagttctcgcacctcgtcaaggcttcgcacccagaggcccgggtccgtgtcgccaaggagcccgacgagattctggccgcaagcaacaccatcgcgatcgccacgaccgactcgagtcattggttggaccttccgccgtggcacgggccggggcaccaagtcgtcctgcacacgtcgctgcgagacctgtcagtgccctcgatcctggcagcggccaacgtcgttgacgatcctgatcacgtctgccgtgaagcgacgtccttggatctggcaactcagcagaccggcaaccgggacttcatcacggggagaatcggagacctccttcttggcgcgccgctgtcctcaagtcctgactcccgtgtcattttctcacccttcgggctcggcatcctcgacctcgcagtcgcctccgtcgtcattgctgccgcctcctcttcagcagtcgagatcaatgggttcgaccccgggaaacacgccacaagcatgattgaggtgaatcgatgaccaccacacagatcaacgacaacacggccgttctgcgcgacgtattccccgccggctccgtcgcattcgtgagcggtgcctcacgcggaattggcgctgcctgcgcgacagcccttgcggccgcgggatgcaacctcgccatcacttatcgaaggaaggagaacgaggcggcacaaatcgccgaatccattgaagccatcgggcgccagtgcatcacaatgcagatggacgtaaccgatgagaaccaagtgaccagagccttccgcatcattcgccagcattacggacgcctggacgccgcggtcttgaactcgggaatcaccagtgacgggcatcttgcaacaatgagccgctccaagtggagctcggtgatcgacacgaatctgaccggaaccttcctctgcacgcgcgaggcgaccaaggccatgtactcgtccggtggctcgatcgtcatggtcgcgtccaccagtggagttgcagggcgaccgggccaggccaactacgcagccagcaagggcggaatcgttgccatgatgaagacgctggccccggaggttgcggcaaagaacgtccgggtgaatgcggtggcacccggcttcattcagaccgacatggtggcggccgttccaaaagcggcactcgcccaggcaatccaacacatccccatgggccgtcttggcctggcacaggaggttgcgtcagccgttaccttcctggcctccccgctcgccgcctacatcacagggaagaccctcactatcgatggcggaatgatcaacggctgaccccaggacccgcacacccccagtaccgagaaagaaacaacaatgaccgagatcacccacactgccaacagcatccgaacccgcgccgaggaacgttccaacaaagcttggcgcctgaaggaggagatcatctccaagctcggtctcgagaccaagccagaatatgtctcggacaaccaaccgctcttcggacgtggccttgagatggattcccttgacactctcgaagtcgtcgtcgccgtcaacaatgagttcggagtctcggtcaacgacgacgacgtacaggcgttcggctcgatcaatgccatggtcgatttcatcgaggtgaacgagaagtgagttctcttgcgctcgaggcgccacccaaggacgcccgtaagaaattcgcctacgacagcgatgccatcaagacgatgctcccacatcgttggccgatgctcatgattgatcgcgcctacgacgtcgtcccagggaaatcgggcaaaggcatcaagtcggtcagcgtcaatgagccgttcttcgccggtcactaccctgaccattccatcatgcccggcgtcatgatcgtcgagtcgatggctcaactcgtggccgtcatctacgtagccgaggccattcagaacaatcccggcatgacgtcgcacgacgcacgttcaagcgttggttatctcggcgcgatccgtcagatgaagttccgacgcctcgtcactccgggcgaccaactcaccctccacgcccagctcggcgagaaagtgggggctctgcgcgaggtttccgtgagagcactcaatggccgggatgtcgtcgcccagggggaactcgtcgtcaccgagcggtgacacccagccacacacgagaaggaagtcccatgatcgttcgcccctacaggccacgtgatgcggaagcgatcgtacatctctacaacagccattccgactcccccaatccagtgtcgggagggattgttgaggaggagttccagagggagctcgaagaacgtggttcgacagtgttcctagtggccgaggaggccggatccattgtcggcacattcgggatgttccgcacgaatggccgacacaccatggccgatgatgaagtcttcgccgacatgttctatgtcaccccgtcacatcgactctcgacagttccgggacagctaatcactgaagccatcagcgagtgcttcatccagggcatcaacgtgatccgcctcaccgtgaaccccgcgaacatctccgcgctcaaggtttacagaaaagtcggttgtgcctgtctcggggccaccgatgcaggcgaggacgggaacattgagctgtacaacttcatccctctggttcttagggcaaccatcaccaaactcgaccacgattgtattcgagccctggcggacatgacttcgttcgcctgcatcaccgagggacgtccacttgatctgtcccacgacttcatcgtggacgctggacggaagatcgtctcccacagcatccagatcgggcgttcaaccatccacgccatggtcgacacgggctcgaggaccattgtggaggccaccctcgacaaccgcgactgggatgctcctcgccagatcgtcgcccccaccccctgtcagaaccggcccgaggaacagcgaggcaaccctgtccggctggtgcacaagaagcttgaggtcaccttcaacgaaggagtcattgagatcagtacgactggccactggggcccggtcctcgcaatgtcctggccctcctccgtctcgcaccgcgctcacgggtggcgacagggccccgccaagtcgtatcgatgcgagcttctcgagaattgcctcgtcctggatgacgaaggaggagtgaaatgcaccatcagcctcaatgattgccaagtcgcgatccggatggatggtgccccaaaaacggaattgagaatgtaccagtggtgcagcctgcgccagggctatctgacggctgacaccggcatcacgagcttcaaccgggcatccagtgggctcggagtcgccgtccgggactcgtccgagattgtcgccgcgggccttcccgtcatccctgacacaccgatcacatggagtgagggtgacatcacggttcagctcgatccctgcggccgcgcctccctgatccactcgaccctggtggaccgaagaatccacttggacgagtctggctcggcaagtctcaccatgaccgtgtttggtgattcccagccccatcgtgccgacaccgtcgagctgcctcccctcgcggcaggcaccgacaggatcgtcctcaagccggctgccggaggcgtgaccacatggcgcttgggcgccaccaaggtgctcaagtcaccgtggccacacgcccgcgcgctcgggcccaatccgatctggcgagccggcctgtgggtcagtcacgagccggatcgccacgaccgtcgccaaggaatggggtggggtcccgatcatcgcagttggaccctgtcggaagacaccatgaccagtactgacgggacactctcctggcgcttcagcggctcccccgacaccggctggacggtcgacgtcacgacgagcaacacgcacggggagaccgtcgtctggctcaccccggactgcccggcgggcgagaggatccgcacgtctgatcatgccgtgacgaccatgcttgacatctcgaagccatggcagcgctggaccacccgatgcgcaattcctctcagacacgggaagtggttcctcatcgagcctgatcatgacctcactgattcccccgaaatcctcatgcgctctgttcacggggtcctgctcgtcggctgtgtcggacgagcccactccggatccgcttcctggcgctttgccatcacgtcagaactccccacctccaacccaagaagaaacgactacacctcagccgcctgaacccaaccagttggaacacccactacagaagaaatggagcaccaccatgtccatcactgagcagtacaagacccttcgcacctcggtcggcctccacacgcctaccggtcccctggtccgtatcaccggtgatgatcgtctcgagtttctcgacaccttcctgtcccgcgcctcggacttcgtggaccccgacaccactcgggagtgcctcgctctcaccgaggacggccttccgctgacgatcttcctccacatcgagcgcgaggaggagtcatggctccttccccgcaccgccatcgatgcggcgaccctcgccacgtacctcggcaacctcgagaccgatggtgacctgtcaatcgagattgctccagagggttggggagctgtcgctgtcgaggggccgctgtcgtggcagatcgccgaaaaccttctcgacttcgacgtggctggcctcgttcttcacgccgtcacggacgtcgtcgttcccggggcccccgagggatcgaaggcatggctcgcccgggtcggaaccactggagagtacggctacctgctcgtctccaacgttcccgacctcgcccgcacttatctcctcagccgcgccacggagctgggcggtcaggcagtcgacgccgatgctctcgcacgagtccaggccgaggccgggatgccctattacgcgatgggcgtgtgccacctcgatgtcgccgggggtgacctcgcctggctcgtggactggcagcgcatcggcgagttccaaggatccgagaatctgcccacacccgtccgagaccagcgccgactggccgccatcgccctgcccaccggcaaccgcccggaagctggtcagaccgtcgctgccggggatgaggagattggaatggtggtgtacgtcaccccgtccgccaatcccgatgaggaactcgcgttcgcacttctggatgctcctttctggactcccacccttccgttgaccgtcggtgcccacgacgggaccacggtcaccctgccccgcgtcgtggcagcctccagcctcaacaagctggggtgacagcgatgacgatcactgctgagaacgccaccacccgcagcgacattgcccggagcattgcggtgaccggcgtgggactggtcacggcacagggtgaccataccgacgagtgctggaccgaacttgtcgatggggtttgcggaatcaccatgaacgtcacgttcgatgactctggcaccacgattccgtgtgctggcgtggctcccattccgaactctgattcgatcgaccgctgttacctgctcggcgtccatgccatgcgtgaagctctcgagatgagtggcatcgacctggactccgtgggtcgtgatcgcatcggactcgtggtgggctcaagcctcggcgcgatgcccaccttggaggcggctcatcgccgggccattgagaccggcgtgctcgatgccggattggcggcagactcccagctccactgcgtcgccgaccacctcgccgctgagttcgacatccgtggaccccgcgtcgtgacatcgaatgcgtgtgccgctggtgccgtggcgatcggctacgccgcagaactcctctggtccgacgatgtggacctggtcgtctgtggcggtgtcgatccactggcccagatctctgccaatgggttcacgtgcctgggagctctcgacaatctcccatgcagcccgatggccggttcctccggtctgactctgggcgagggagccgggttcatggtcctcgagagaacagatgcggcggctgccagaggccaggaggtgatggccgaaatcgccggctacggcacaagttgtgatggttaccaccagactgccccggacccgggtggcaatggcgcccgcagctcaatggaggccgccctgcgctcagctcatctcaagccgtccgacgtcagctacgtcaatctccacggcaccggtactccgaccaacgacgccgtcgagccgaaggcactccggtcattgttcaagtccgatgaccttccccctgtcagttcggtgaagggcgccatcggtcacactctcggcgctgctggcgccatcgaggccgtgtgctcgatcaaggccatccacgagggggtcctgccgccaaccgtcaacaaccgcgggcaggcttcccgaactggtctcgacatcgtgccggagtgcgcacgcaaggccgctcccgacgtggtcatctccaactccttcgccttcgggggcaacaacgcatcagtggtcatcaccgcacctcgaggaggcgttcactgtaccgccccggcgcagcttcgcgaggtcggaatctcaggaatggcagctctggcgggaaaggccgccaactcggaggagcttctttcggccctgtcagaagattgtccaatctggatggccgatgagaagacctgggaaggggatgctgtccaaaccggccatgtggacatcaagcgcctgtcccgcacaatcaaaacgaaaaaggttcgtcggatggaccccttgggaatcatctccagcgcggtggtgactgatctgtatgcccgacacgggaagctgagccgcaaggatgccgaaagcacgggaatcatcttcgcaaccggctacggtcctgtgacggcggtgacgcagttcaatgacgggatcatccgccacggttccgagggtgccaacgccctggtgttcccgaacaccgtggtcaacgcagccgcaggccacctcgcgatgctgaatcgctaccgtggttacacggccaccttggcatgcggtggaaccagttcactcatggcgctgcttctcgctgctcgcgtcgttggccgcggcgctgcggatcgcatcatggtcgttatcgctgacgagtttcccagcattgccgtccaggccgtcgcgaagcttcctggctaccgacacagggttgatggttccggagccgtgctctcggaaggcgcggtatgcgtcctggtggaggccgtcgaagtcgccgaagcacgcggtaccgcccccatggcgctgctacgcggcttcggatcccgtggagagtccgtgggagtcggtcacaccgcatccgatggacgggcttgggccaaggccatggccgctgcactgggcccggccggcctgactgcctccgacgtgtcgaccgtcgtggcggcatcaagcggacatcctcgcgtcgaccgagccgagcaggcggccaggcggatcgtcggactgtccgcaaccgctacgaccttcccaaaggcgattgtcggagaaacacacggatcggctgccgggatcgggctgttcggtgccctgtgcggttcgaggtcagccgcgcaccagaacatccttgtcaacgccttttcccacggcggtggttatgcctcgatggtggtggagtcactgtgaccacgacgcttctgccacgggttgcccagccgggaccgggcgtcagccatgtcgacaccgaccgtcccatcgagtgcatcatcacccaccacccccacatgccgcgtgatcgcggaggccacgccacctccgtgtcaggcaggtacttgctgcgccaagccgcagaactcatgctcggcacggatcctgcgcattgccccgtcgtcgacccttcgcggcgctggtactggcccggaatcaatcttcacggttctgtctcccatgtcccgggctggagcctgacgacgctgagcaccggcggccacatcggggcagacatccaggacttccgggagcgtcccggcgcaatggcattcatcggtgacctggtcaagctgtcgcgatcggcgtcactccgagaattcgcggagtgcgaggccgtcgtcaaggtgtccgaattgactaaggagacgttcgggcacgtgcgactgcccgaatggacacccggatggcgccacgttttcgaggactactgggtctggagtctcgagatgcacgggatgggagtcatcgcactcgcatccgatctcccccgagccattcgctggtggcggtgcgacgccgatgcccgtggccgtctccaggctctccgacccataagcagtcttggaccaggaaggccgtcatgagccggtactcacgtcgaatctcaggcatcgaacgcggctatctcaacgccgcaacccggggcccgcaccccaccatccacacgatgatcgacttcgagggccgcgtccccgccgactgttggcggcacgcatccacgattgcgtcggccgccaaccctggcatgacagtggtccggaggtcgggccgatggacatccgatccagcgggctgtccggttgtgttccacgactggaccgcggaccccaacgacgttgccgacttccacgctgacatggatctcgtgacgggaccatcgtccacgctccacgttttcgagggggcggaacgcacccgaatcaccttggcagcaagccatgccgtgaccgatgggcggggcatcgaacgatttctcgtcgacctgcttgcagcgttggacgagcgtgaacccattggaagccccgacaccctgaccgatgtcgatatcaaacgatccttggagaacagcatcaagccccgacgccacctggccgctgtgcccgccgatgtcctttctccactgggggggaggaagaaccaacgtatatgggcctccaggacgtggcacagtgccccgggagccatgagcggaagaatcgctgccgctgtggccgagatgatcgaccacgccgcaatgatcatcatcccggttgacatccggcggcacgtcccagaggtccgatccacagcaaacctaagtgcccaactgccagtgatcatcaccccgaaccagcgctggcaaagcatccatgggcatctgctcacggaccttgctcgccatcgagaccttgcgatcatcagtgaggatttccgccacaacaatccgttcgcatcgaccttggaggaaagccaggccatcggcctcgatggtgtctatccctgtgccgcaatcatctccgaccacgggaagctcgacctttcaaggttccagaccttggaactcaccccggtctcgatgcgaagcctcccgatgctcgttccctactccgcaatgttcatcagcagttgcaccgtcggcgagaccaccactgtcaccatcgctcatcgcgctgatgacgatcccgattccataaacaccttcttccaccacatcgaatcccagatgtccatctgagccacgtcgtccctggagagcaaacatgaccacccaaaatgtcatcaccccgccgcgccccgtcacctcccatgccacggcgaccaggtccgaggctccaccgcgaagcgtcatcagagccatggccatctcgatggtcgcgaccctcatggtcatgctcgacacgaccgtcgtgaacgtgtccttgagcgcgaccaccgcccgcttcgggagcatgggcagcgtgcagtgggtcctcacaagttacctacttgcactgtgcgcgacgatgacggcctccgcctgggtcatcgaccgccttggtccacggctcaccttcatcgcctcaatgaccatgttcctcatcggctcggtgatgtgtgcactgagcgattcagtgtggcaactcgtcactggcaggaccatctccggtgccggagctgggatccttgttccgacagcatccgtcctgcttatccgtggcatcccacgcgaacaacttggcagggtgcaggcactgaatgggagtgtccagttgatcgctcccctgatcggcccgactgtgggcggtctcctcgttgacaggtgcgggggctggccggccatctactgggcgaacgtccccgtagctcttgttcttctgattgaggccgtccgcgtcgatccggacgaaccacacaccgctaagcgccgcctcgatgctctcggcctggtctgtggcagcaccgcgatcgtgctgacagtgcttggtgtctcactcttcggcaggacgtcgcgaaacaccaccttcctgcttacgatcggcgcgcttgcagtcctcgcatgggcgttcttcatcacccacatccgaagggctaccaaccctctgcttgacgtttccctgtatcagaaccctgtctattcatggtccagcttcaacgtagcggtgcttggtttcggtctctacgcccccatggtcgtcatgcccctctatctcgaggcgacgcgccacctcactgccgtccacactggtctggtgatgtcagtggccggcgtcggcgtcattatggccggaatcctgtgcacgaagatcatgggccggatcggtggaggcctcacgatgacagttggcataactctgagcatcatcgccactctgcccctggtccggctgacgaaccacacctcctacatactcctggcagtctgcttggccttgcgtggagcaggaatcagcctgacaatcgtcccagccatgacacgggccttcgagtccatcaagaggacggccatggcggacgcctctgcacagctcaacctgttgcagcgaatcggcgggacaattgcgacagcagtcatcatcgcagttatccaccacgaggccatgctcacccgcggactctcccccacagtgttctcgcacgccaacgtgtggatcctcaccgcgaccgccgtcacccttctgccggccttcgcgcttgcgaaggccgaaagacaacagcaggatctctgagcaccgaggagtactccctcgtagaccctcctctgatctaattgggttcgttccaagtgtgtatctcactccggggagccccgattgctgaaccacatcccgttcaccctggcgagtccctcgtggtacgacgtcccctgggcgcccggatctccgtatctcacaggagatatctcggtcctgccagcggactcgccaaggtggacgacgaccatccggggtccttggcaaatccacatgccacctcgtccgacccttccagaggtggggtggaaagtgcatgtgtctgccaagccatcggaattggaatcggttgcctcagtcgtagcactgtggtgcgtacgccacagcgtccccttcaaagtacttcgcacccgaggtctcgttcacgcgagtcaagtcaagtatgcggaccgaagtcagagcggcaaggtctgcacctgctaccccgacggcgagagccttgagcacttctgctccggtcttgccgagctgcttcagaacgtcgattcacctccggtgtccggcgagctgcgagtcggatcctcccctctgtggttgcgtcacgggagtttccgagaggcatgggcggtgtcatccacaggagtaccgttcccggtctacccgggaacaacacatcctgatcgtcgaggccccgcgcccgcagaatccgatcacgacacgccgtggatccggaggctccgtcggacgaatcgccccagcacggttcttcccatcgacgatgtcagactcctccaccgatcaaatgctggcggcgtgtatcaggcaacatggagagacggcacatcggtagtcgtcaaggaggcccggcacctgtccggacttgatgcggcgggtgtcgacgcccgagtgcggctgcgtcacgagtacgaggccctgagaagactggacccctatcgggccgctccccatcccattgatctcattgagaccgaggacggctcgttcctgatcatggaattccttgacggaatgacagtccaccaggagatgtcgaggttccatcctctgattagtaggcgacctcatcggctatcgatgaccgatttttcacgctggtgccgagaggtcgaagatcgcttgaggaatgtcacgagggtcatggccgggtgcggaatcgttcacggggatcttcatcccgcgaatctgatacatgtcggccatgaggttttggttactgactttgaatcctgctcaatcgacggggtcgccgtctcgtcagggatcgccgctccctggttccagtcggacgacacgattcccgatccggcgacgactgacgatctccacactcttctcgtggatccgacttgcggccccgcgcttgtcccccatccaaatcttcgcgcgctcatcagccaggccgcagtcgaggacatgatgggaaatccgactggtttaccacatgcctggaacctcgaggacatgacaagcgaactcgccaaggggatccgggcatcagccactcccgcacgagccgaccgcctctttccctcagacccctacctgttcgggcatccaggttcagaattcggcctgatgcatggcgccgccggaatcatggctgctcttgccgtgactgggtacggtgttgacgcgaatcacgtgacctggatgaaggaccgcttggccacccgcccgaccctgctgccggggttggccaacggaatcgagggaattgccctgggtctctccctgtgcggtcagaacgacatggctgcatccctgctccaccagtccggaattctcacgatcacaacgaacggatcgactgacctcaccctcggtactggtatggcgggccgagcgtgcgcgctgcagtccctctcacaacgactgtcatcgaaatctctcgcccacgctgcatataccctctgggaacaactcgccgtggctgtgcggaacactgatgtggccttgccgaacggcctgttctccggttgggagggaatcgggctctccctgcttgcctctcccctgccggatcgtcatgatctcgcccgccactcactccgactggccctggccacgacaacgattgttgacggtgcgctcttctcaggcgagggacagatccgatggccatatctggggcgtggtcccgcggcatgtggcccgctcgccgccaggcttgatgatgaccagacggccaaggccgtggcacagacctgtcgttgtcccctgactgagtcatccggtctccacaatggccgcgcaggtctcctactcgtcctccgccagctcgtgggagaccaagacgacgccgttcgccgccacctcatgagactgtcgtggtcgatggaccgtcgcgaggaaggcacattgctgctgggtgatcatggcctgcgtttctcatccgatctcgcgacggggtcagccggcgccctcctcgccctgagcagggacccatggcggaacatgacacgaatgctcggaatatgcgatgacacctgtcatggcccactagtgacagtttgatctagcgccgatagttcacaactgaaagactccaaacatcgaggaaaacatgctgagccaaaacgccttggcaggcgtggctcgtttcaccacgatgaacaccaggagacagaatgtccgttgaggccatgcaatccatcgagatggacgaggaaaacagcgccagccagacagtttgcgcttgttacagcttcttctcgtggtcaggatgctgcgtagtctcccaagcggtggaagcatcttgatcgtgtgagacaccgtcgactaccctgtcccccgtggtacgcacacgccccgtcctggacagtcccggaagaccgctcatcgcctccggagtcgtcctggcggtcctgctcatcatcgcggtgatgacgatggtgcttcagcgcgaccccactctcacccccggacgccgcattctcggtatcgtcctgtccacggtccaggccgtcggattcatgtggctgcagacccgcatggttcgtcacggcaagggttcgcgcaacatgcgtgcgacccttggaagggtcggtttctgggccacgtggggactcgtcgcagtgggagtcgtcaatctgtggctgaccaactcgtggaccctcttcggggcctccgtcgccacgcccctccttctcctgccaggggtgtggagtgtggtggccaccctcgtgaccctgatcgtcggtttctccgacctcgtggtcacccacacctcgccactgacctcagccacggtcgtgctggtgaccatcgcggtgtcggtgaacctctacgcattcacgaagctgtcgacggcactcgttgaactccgctcctcccaggaggagatcgcccggctgcgcgtggacgccgagcgtcaccggatatcgcgggacctccacgacatcatcggtcgcaccctggtcgccacgtcgatgcgccagcaggcggccctccacctcgtcgaccgcgacccgcaacgggccaaggaacagctcgacgccgcccatgacgcaatcaccgaggggcagcaccagttgcgttccatcatccaggccgagatgagcaccagcctccccgacgagatcagcgacgccacattcctgtgcgaccgactccacatcgacttccgcatggatgaccgcggcagaccgcacaaacccttcgactcggcggcggcggcggccctgcgcgagggaatcacgaacatgctcaagcacagcgcggcgggctactgccacgtcgccatctccccggacctcctgaccgtcaccaacgacggttgtccgcaatcacctcgcccctccaccacaccgggcaccggaatcgaccatctccggtcccagatcgaggcgctcggtgggtcggtgacgacgtcgcggccctcgcggggcaccttccggctccgctgctccttcccgacccggggggcgtccacgaccacacccgcgaccgaaggaggacgatgacgacgagaatcctcctcgccgaggacatcaaactggtggcagaggccttcgaggcactgctctcggtggaaccggagttcgaggtcgtcgcacgggtggcacgcggcgacgacctggtcacatccgccacccgcctgttccccgacgtgatcctggccgacatcgacatgcccgggatgaccggcatcgaggccacccgaatgcttcgcgacaagggataccgcggcagaatcatcctgctcaccgccctgccgggaagcgggcacctgcacgccgcgatggctgccggagccgacgggtacctgctcaagtcgatcaccgcgccctccctcatcaacgccatccgggcggtgtgcaacggccagtcggccatcgacccgaacgtcgccgcggtcgccatgcgcaagggaccctcgcccctcaacgaccgggaaaccgagattctgcgcctagtcgccgacggttcctccaccgcgcagatcgcctcgcggctgtacctcagcaagggcaccgtcaggaactacctgtcgacggcgatgtcgaagctcgacgccgactcacgcacagcggcggtcacgcgggcacgcgaggagggctggctgtagcaggcgacccgctcagcccaccgcccctcagcccgccgactcctgacgcacggcctcctcgaccgcccggctgagcagggacccggccctgaccatcgacgtctccgggtccggctcgagatcggacaacgcgatgatccggtcgaacgcggaccgtttctcctcgggcaggtcacagcgtccgcacaccgcccagacgggcaccccggcgtcccgggcgatcttgcggatggtgtcgggaagcttgccgagcagggtctgctggtccagccgcccctcccccgtgacgacgagactggaggcggagatccgcgacaccgcgcgggaccatcccaggacgaccgccgcgcccgggcggtacctggtccccaggcacatcagcgcccagccgacccggctgggcggctgcgaaccccctggccaccgcccggcaggcctttcccgaactcagcgaccccttgaaggagtcgacggcaacgatgaccggcgcattcggatcaggacgcatgggatcagcatgtcacgtcgatacggagcagtcgcgccgcctacccctagactcgggggcatggtcaaccgagtctacctgtccctgagcgttctcgccctcgtgctgtgggtggtcgcctaccgtcacatgccgggctgggccgcgggcatcaccctggtgggcatcgtcgtgctgtcgctgtggtgcgagtggtcgcgggtgcgcaccctggccaggatcggcaagtcccgccagcagggcccccgctcctcccgaggacgcaacctgtcgtgagcaatacgattcccgcagccctccaccccggccctgacgaggcc

SEQ ID NO: 430 - DNA, 26620 bp, Propionibacterium acnes
ccttgtggacaccacgtcatccacatgacttgtgtcacatgattcccggaccatcatcaagcagatgctcacccaactgtaatgatttctgttctgaatctggacatgctctgacctgcattcaatgatcaattccgtgcgatattccacaacgcacggagaggtcacagacaatgataacagaaagcatccccacgcggctgctcgtgtggcacgagcagaccgatccgaccaagctcctcaggatcaccgacgcgatcaggaggggggatccccttccccccatcgaggccatggcgatcggccacagattcctcgtcctcgacggtgcgcaccgggcccaagcccaccagtactgccatcgatctgagatccgagcccgcctccacaacctccccctcagcgcggaagtaccaggctggagccactccataccccgcgatgcagcagcgaaactggctcacctactcctccccgtggacgctctcggtcaggcggaaatcgtcctgcacggggtgcgccgtcaggtggggaccgcttcacaacgaccgcgcgacatctttctcgcctgccaccggatcgcgcgagttgcctacgcgcatggaatcagacctctcggcccggagctctccaacgctccgacgatcgacgccgccaccatgacctggcgcccgccgaacgtgggcacgttgtgggccatcgccagcagtctcggacccctgcccgcaactgtgacccggttcgccccgatcctccggcacgacgccatcggggattccgcgatgacacccgtcacctccgccgcgtgacgacccgcgccaattccgccccaccactggatgaggggcagccgcgtggacgatgctcctgttcaggcagggactccatacgagaccaataggaaaatcatgatcaaaaacacaagccctctgaccgtgaaaaatgtctcgaaaacattccgtggctccagcggagaagccatcaaggccgtgcaagacgtgtcattcaccgttgagcgtggtgaggttgtggcattcctcggcccgaacggcgccgggaagtccaccaccatcgacatggctctcggcctcacccgccccgacagcggccagatcgaggtcttcggtactgacccgctcagcgcggcccggtcgggacgctgcaccgcgatgacacagaccggcgggttgctgcccgacctcacgattgggcagaccatggagatcatctcctcgctctatcgtggctcccacatgaatgcctgcatggagcgagcaaggatcacgcatctggccgatcggcaggtgtcgatgtgctcgggaggcgagcgccaacgacttcgcttcgcactggctctgctgcccgatcctgacttcctcatcctcgacgagcccactgcggggatggatgtggaggcgcgccgggacttctgggcagagatccacgaggacacgcgtcgtggtcggacaattctgttcgcaacgcactacctcgacgaggtggacgagttcgccgatcgggtcatcctcatcaaggagggccgcgtcatcgccgacgacacctccgacgcgatccgcaccatgtcggggggttgcaccgttacggcgaccattcccgacttctccctggcacgactgaatctgccgggcacccaactcatcaagcagggcggcgcacgcgttgatctgcaccatcccgattccgatgccctcgcagcgcgagtcatccagctcggcggcaccgacctgcgcgtggtcccccgcagcctcgacgacgccttcctcgctctcacctcaaccaccaaggagtcctgacatgaccgcccaagcgcttcccgcagtcgccactcccaaggcccgccaccgatccgccatctcgctgaagtacttgtggtgcgagatgcgtcgccccttccggcgttcgacgatgctgttcaacctcgccctccccgcagttctgtacctggccctgttccgcaccgtccacaccgccgagctgccggacgggaacttcgcgatgtggatgatgatcggcatcgctgtctacggagcggccactgcgagcaccagctacgcagcctccatctccgtcgacgaggccaacgggtggacccgcaccatccgcctgacgccgttgtcgtcggtcgggtacgtgctggtgaaggtcctctgcgccatggccatcgccctggccccgaccctgctcatcggtctcatcgggctgttgaccggagctcacggcacgctgcgggtctgggtaatcggactgggggcggcttggctcagctcagcaatcttctccgccttcggcctggctctcggactgtccctgcgtcccgaggtcgtcatgcacgtccccggcctggtcatcaccggtctggcgttcctgggcaacgtcttcgtccccctcagcgggacgatgctcaccattggccgctggagccccgcctacggcatcaccgcgctggctcgttacccgctcaccaacggcatcgacatcgggggcggccacgactccctgacggctgccctcatcggcaccttctgctggttcgccggattcgtgttctgggcctcccgtcgatttaccaagagcacgggtcgtcagtgacagattcggccgatctccggaaggagcagtgttatgaccaagcccctcattgcagtggtcaccgcgggccaaggagcgcagaagcctcgcctgctcacgccatggctcaaggtccccggcgtcacggagaagcttgctgcatggtccgctcaggccgatgtggacctcgtcgagctcggtaccagggcgaatgcagaaaccttggcagcgaccgagaatgcgcagccactactggtctgtctcggagtcctcgtctcggatctcctggccgaccagaacattgtgctcgcaggacactccgtgggcgagctgacagcagcgtgtctcgccggggtagttgatcccgggacggccgtcactcttgcacgacggcgtggactggccatggcgcgggcctgcgctctccacccgaccaccatggcggccatcattggtgacaatccggatgacgtcctccggcggctctcggaactgggactcacggctgccaacatcaacggaggcggacagattgttgcggccggctccaccgacgcgatcgcggaactggtggcgacccctcccaacgggaccgcagtcaagccgttgcgagttgctggcgcctttcacaccaagtacatgacgcctgcgcaggacgctttcgcccaagctgctcaggacgtcaccttctccgacccgcagcacccgatcatctccaacctcgacgggcaggagatccggtccggcaatgacctgcgtgaacggctgattgcccaggtgaccgcgccagttcgatgggatctctgcatccagcagatcgcggatcgtcagccggaactcgccctatcggcccctccggggaaggtgcaggcgtcgctcttgtctcggcagatcccggacctcgcgacggtctgcatcaccacaccacgggaggcagcccaggctgcacagcggatcgaccagtccgtatccgtccttcagggggcatgatgctcatccccgagtacttcctcacagcctgttcggaccatgctgagcgcctggcgatcatcacccacaatgacgttgtgacgtgggccgaactggcgactcgcgtcgacggttttcggcgctggctgcgggaccatggcgtgcaccgccaggacagggtcgttctccagacgccaagcaccgtaggcacggtagccctcatgtgggcctgcctgctcgacggcgtgacgatggtcccggtgcaccaggacctcactgcctcccaggtgcagcaagtcatcgacgactgccgtccagctctggtgtgtggcagcccggacctcgtccaactcctcaactcccccggaatgaagacaagcacacctccaacgcggccggagtcaacgagtattctgccgtccttgtcccgggtcagccccgatgaccttgcgatgctcatctatacgtccggcacgacgggtctcccgaaggggatcatgtgtccccaccggcaggtcgccaccgccgcacggatcgtccatgactgtctcgggtaccgcacggacgacgtcattctctgtcgcctgccgttgtccttcgactacgggctctatcagattctgatgtctgccatctccggtagcgcggttgtcctgcgggacggaggcgcgcaggaccgcaacctggtgcgcgacatcgcccgtcacggcgtcactgtcgttccagtcgtgccgtccatggcgtcaatgctcatcaccctgcagcgtcgtgatcagttgccgaccatcgtcagactgttcacgaataccggggcgcgtctggcacccgagaccgcgaaccagttgctcgcaagcttccccggctcccgctatgcgtcgatgtatggcatgacggagtgcaagcgcatctccatccttccggtggaggagtacgagacgcatccggacagcgtgggaagagctctgcccagcactcacgtcgagatcgttgacgctcagggagttccggttccggcgggcgagcacggggagatcacggtgtccggcccgaccgtgatgaacggctactggcaggtgccgaacagtcccagtggacgattccgacccagcggccacggcctcactctgttcaccggtgatcgcggctggatggatgaggagggacgtctctacctcctcgggcgcgacgacgagatcgtcaagcatcacggcatccgaatcagcctgcaggagatcgagatagccgccgaagccgcgccgggcgtcgacgcagtcatcgctctcaagccggcctccgactcggcccccattgaaatcgcctactgcggcagcacgagtcccgagaacctggcccgccatctcgaaaccgtcctggaccgggcgcgacgaccccaattcatccaccaactccagcagatccccctgacccgtaacgggaaaccaaaccggtcagcagccgccgaggccatccgctcaagggcgtgacggcgaaggccaacacccacagacgaaaggaaaccaccatgacccaggccgagttcaaccagttcatcgagtccacctgctccgcgacgatcgtggatcccgaccgtcctttggtcgatcagggcatcgactccctcggaatgctcaccctcatggtcgctatcgaggacagcctcggcatcgaactggatcccgagtccctcgccgacggtaggggttccacgccctccggtcttctgtcccttgtcgagcagccgaaagcgacggtgtgacgacatgacgacgatggttccttgccgccgtgtggagatgccgcaactgttcgaccacatccccggaagcatctctctctcaggagggctgcccgatctgagcgtgctcccgagcaatcagatcgccgaactgacgtcccggatcatgcgtctcggctcaagaatcctcctgcaatactccaccccttcggtctcgtcctccttggtgccggccatcctggacctggcggaacgaacatgcatgtcaccggatccgcggaatctgatcccgaccgcgggttcccaactgggcctggccatggtgatcaatgcctttgacggcgatgagatcatctgtgactgcgccacctatcccggggcgctggccgccttcgcctctgccggcgtggaaacaacgggggtggccagtgacgaggaggggctcaacccagacgcgctcgctcacgccgtcgcagagggtcgggccaatggccgccgcatcgcagccgtctacaccacgcccaccttccagaatcccaccggctccgtacagtccgagaaccgccgtgcggccctgctcaaggtgtgtgctgacaatgacctcctcctcatcgaggacgatccgtacggcatgctgtccttcgacgggcagacgtggccagctctgaagtccatggacccacagcgcgtcatctacctgggcaccttctcgaaggtgttcgcaccgggcgtccgttccggctggatcgatccgcccgccaatcttgtcgagaaactccgcgctgtgtgcgagatcatgacactctcgccatcagccctcaaccaagcgatcatcggcgagtaccaccgtcgtcacggatgggacgaactgttggagggctatcgcgcctcctaccgcgaccgagcccgtctcctcatcggggctctcgaggctgaactggcaagaacgaattgcactggcacgtggacctggcgtgaaccacggggcggcttctacctgtggttggagaacgtcgccagcaccagcggtatcgacgttgcgcgtcgcgccgccgacaacggagtggccgtggtgcccgggaaacacttcgacgcagccggacacgattcgccgagcctgcgggtgtcgttcagcaattcacgcccggctgatctggtcgaaggagctcgtcgtctcgcccgtgcactggtgggagaggacgttcagaaatgactctcgcgacacgcaccgccaccgacaccctgcagcagaccttgccctggggcacccacgaacgtctcgtcttcgggcgggcgctcctgcgcagcaccggcttcccagccgaaggcttggccctgctcgactccgacgacatcctccccctcctcgactcctttcttgccggggacatcgacagaactcacttcgagaaggaatacaccagtcgcgaggagtccggcgcaagggcgctcatcaacgtcttgaaggacgatgcagtatcgcgcgccatcgcatggcagaaccccaccgcgtggaggtccttcgaatccctgtcgtccacgagcggaatcaatgcttcgactcggcgcaaggtacgccaactcgccctctactggcaacgttactgttccaaggctgagaccattggatacttcggcccgttcgcctgggccgaagtcgacccggaggcctctgcggtcgaattcatctcctccgaccatctgatcgaccgttcccacgtcgcaatggaggcgtgggcggtcattgagatcgggaaagccctggcatcacgggccgaccttcagtggtggatgccaccaatcctgtcccccgccgtcgacctcaacatggagagaggcaccgtgacggtggctggacaccagccacgacgggtccgggaggacgaggcacgagttctcttcctgaccgacggcacccgtcccgccgcccagatcgccaagagcctcgacatggagcccgagcggttgcgcaggatcctcgtggcccatgaacgtcgtcacaccgtgatctgggacgccaacatccctgtctcagtgcacgcgtgggacatcctgcacgaacgcattgcccagatcggagacgctgggctgcgagatgaggccactgctgttctcacgaggttcgacgagcttctggaggtcatccgcaacattcccgacgcccggtccctgacggaggcgacggaatccctgtcccgtcttttcgaaaccgtgacaggaacctcttcgaacagacgtgcgggccaggcatatgcagcccgcagcctgtgctacctggactgcacccgcgccggaaccgccaaggttgggacccggcttctcgaagccctcgacgcccccctcaacctcgtcctacaatccgctgactggttcgcggcgaccttggcaaaggaatacaccaccgaaatcacggacctcgcaaatcgaaagcagcgggcctcccaccagccactgaccatggctgatgtctggccgtccacgatgtcgctgttctggggggactcaccgtccccactgcagcgagccgtgaccgaactgtcacggcggtggagcagagtcctcgaggggctgcagccagtcgacggtcgcatcgacacgacatcgtccgctctctcgggcgccgtggacgagcagttccccgtgtgcaccccgattccagaactgtcagtgcacagcccggacctccaggtcatcacctcgagcactagcaacatcgcctccggacgaatcactgcagtcatgggtgagctacatgcctgtctgagcagtctcgacatgccgttgctcgagtggtcgctgccccatggttccattcgcgatcgcatcaacaccgcgctcaacctgcgacgtctggttcccttgttccccgagacatggaggcgcaacaccggccgcatggttccagcgacggtcggagtgggggatcgcgcaatcgggttcactcggacggccgatcaagaccgtgcgaacacatggtcgatgtcggcactgctgttcgagcagaccgaggacggactcatgatccgtgatcccgatggcaggctctggaccatcgcacaagcgtggagcgtgcccatctccatggtcgccgccgatgcgttcaagatcgggctgcccggctcaccagcccctcggctcaccattgacaatctcgtcgtgttccgtcgtacctggaggtttcccgctggctccatcgacatcatgcacggttcagccgccgagaaacacgctcggctgagggagtggcaggtcacgaatcaccttcctgaccacctcttcgtcaagttcccctccgaacccaagccgatctacttctccttcgagtcccccgccatggccacggtcttcacgcgatcactgcagcgcgacgcccgagagaatccagacagtctcgtgacgatgtccgaagcactgcccgagcctcaatcctcatggctgcacgacacccggagccaccactacgtccacgaattccggctgcaactgaccaaggagcgacatgacgaccacagttgagacacatcccgaaacacgtggcacaaccgcgacatccatctccaatctgatcggtcacacccctctcgtaagaatggaccatctgttcgacggcctccccttcgaggtgtacggcaagctcgagaagctcaatcctggcggaagcatcaaggatcgagcagcacaatccatgatcgaacgggcaattcgacggggtgagatcgtcccgggccgtacgaccgtcatcgagtccagttcgggaaatctcggcatcgccgtggcgatgctgtgccaggagcacggcctgaatttcatctgcgtaaccgatgccaaggccacgccaacgaacattcgactcatcgaagcgttcggggccactgttgaggtgatcgaagaacctcatcccgagagtggcgaattcctccccatgaggctcaagagggtaagagaactgctgtcagagattccagatgcatggtggccgaatcagtacgggaaccccgacaatccggcggctcacgagcggactgtccgcgagatcatcgaggcaatcccgcgggttgacacgattgtctgcgcgaccggctcgtgcggaacccttcgcggctgccacgaagcattgcgaaagctgtccccacgcacccgactcgtcgccgtggacgccaagggcagcgccatcttcgacgaggcaggagcaccccatccccgctgtgtcccgggacacggtgcgtcagtgcgaccgccgctgtggcgcgcggggctcgccgaccaactggttctggtctccgacgcggactgcgtcgtgggatgccaggaggccctgcgcaccgaggctcttctcctcggcggatcctcgggagcaattctgacggccattcaccgagtgtctcccacgattcccgctggttccaccgtggtgacgatcctccccgacggcggcgagcgctacatcgacaccatctacagccgctcgtgggtcgactcacacatccccgggctgccctctctcgccgactggggggctcccaaccccgccaattcgtatgacctgaacagaagtgcctcatgaagctctacaccagagagaccgtcgaaactgcgcttgtcgggcgtcatggccaggttctcagtgccgtacagagtgcatacatgctgcattcgacgggagagacatcgctgccattctcaaccttcctccgcccggccgggtatccgaacgatcggatcatcgcacttcccgcccacatcggaggcgacttcgacatagccggtatcaagtggatctcatccttcccggaaaacctcgaccggggccagcaacgagcttcctccgtactcatcctcaatagtctggagacgggatacccgaccgccctgctggagtccagtcagatttcagcaacgcgaacggcagcatcagccgccctggccagcgccaccctccatggctccgaagaccatgtcagcacgattggcatcatcggctgcggaacaatcaatcttgcaacgatcgactacctcttccacgtgcacccccagatcaacgaggtcctctccttcgatctgaggcgggagcgggcccatgagttctcgcacctcgtcaaggcttcgcacccagaggcccgggtccgtgtcgccaaggagcccgacgagattctggccgcaagcaacaccatcgcgatcgccacgaccgactcgagtcattggttggaccttccgccgtggcacgggccggggcaccaagtcgtcctgcacacgtcgctgcgagacctgtcagtgccctcgatcctggcagcggccaacgtcgttgacgatcctgatcacgtctgccgtgaagcgacgtccttggatctggcaactcagcagaccggcaaccgggacttcatcacggggagaatcggagacctccttcttggcgcgccgctgtcctcaagtcctgactcccgtgtcattttctcacccttcgggctcggcatcctcgacctcgcagtcgcctccgtcgtcattgctgccgcctcctcttcagcagtcgagatcaatgggttcgaccccgggaaacacgccacaagcatgattgaggtgaatcgatgaccaccacacagatcaacgacaacacggccgttctgcgcgacgtattccccgccggctccgtcgcattcgtgagcggtgcctcacgcggaattggcgctgcctgcgcgacagcccttgcggccgcgggatgcaacctcgccatcacttatcgaaggaaggagaacgaggcggcacaaatcgccgaatccattgaagccatcgggcgccagtgcatcacaatgcagatggacgtaaccgatgagaaccaagtgaccagagccttccgcatcattcgccagcattacggacgcctggacgccgcggtcttgaactcgggaatcaccagtgacgggcatcttgcaacaatgagccgctccaagtggagctcggtgatcgacacgaatctgaccggaaccttcctctgcacgcgcgaggcgaccaaggccatgtactcgtccggtggctcgatcgtcatggtcgcgtccaccagtggagttgcagggcgaccgggccaggccaactacgcagccagcaagggcggaatcgttgccatgatgaagacgctggccccggaggttgcggcaaagaacgtccgggtgaatgcggtggcacccggcttcattcagaccgacatggtggcggccgttccaaaagcggcactcgcccaggcaatccaacacatccccatgggccgtcttggcctggcacaggaggttgcgtcagccgttaccttcctggcctccccgctcgccgcctacatcacagggaagaccctcactatcgatggcggaatgatcaacggctgaccccaggacccgcacacccccagtaccgagaaaggaacaacaatgaccgagatcacccacactgccaacagcatccgaacccgcgccgaggaacgttccaacaaagcttggcgcctgaaggaggagatcatctccaagctcggtctcgagaccaagccagaatatgtctcggacaaccaaccgctcttcggacgtggccttgagatggattcccttgacactctcgaagtcgtcgtcgccgtcaacaatgagttcggagtctcggtcaacgacgacgacgtacaggcgttcggctcgatcaatgccatggtcgatttcatcgaggtgaactagaagtgagttctcttgcgctcgaggcgccacccaaggacgcccgtaagaaattcgcctacgacagcgatgccatcaagacgatgctcccacatcgttggccgatgctcatgattgatcgcgcctacgacgtcgtcccagggaaatcgggcaaaggcatcaagtcggtcagcgtcaatgagccgttcttcgccggtcactaccctgaccattccatcatgcccggcgtcatgatcgtcgagtcgatggctcaactcgtggccgtcatctacgtagccgaggccattcagaacaatcccggcatgacgtcgcacgacgcacgttcaagcgttggttatctcggcgcgatccgtcagatgaagttccgacgcctcgtcactccgggcgaccaactcaccctccacgcccagctcggcgagaaagtgggggctctgcgcgaggtttccgtgagagcactcaatggccgggatgtcgtcgcccagggggaactcgtcgtcaccgagcggtgacacccagccacacacgagaaggaagtcccatgatcgttcgcccctacaggccacgtgatgcggaagcgatcgtacatctctacaacagccattccgactcccccaatccagtgtcgggagggattgttgaggaggagttccagagggagctcgaagaacgtggttcgacagtgttcctagtggccgaggaggccggatccattgtcggcacattcgggatgttccgcacgaatggccgacacaccatggccgatgatgaagtcttcgccgacatgttctatgtcaccccgtcacatcgactctcgacagttccgggacagctaatcactgaagccatcagcgagtgcttcatccagggcatcaacgtgatccgcctcaccgtgaaccccgcgaacatctccgcgctcaaggtttacagaaaagtcggttgtgcctgtctcggggccaccgatgcaggcgaggacgggaacattgagctgtacaacttcatccctctggttcttagggcaaccatcaccaaactcgaccacgattgtattcgagccctggcggacatgacttcgttcgcctgcatcaccgagggacgtccacttgatctgtcccacgacttcatcgtggacgctggacggaagatcgtctcccacagcatccagatcgggcgttcaaccatccacgccatggtcgacacgggctcgaggaccattgtggaggccaccctcgacaaccgcgactgggatgctcctcgccagatcgtcgcccccaccccctgtcagaaccggcccgaggaacagcgaggcaaccctgtccggctggtgcacaagaagcttgaggtcaccttcaacgaaggagtcattgagatcagtacgactggccactggggcccggtcctcgcaatgtcctggccctcctccgtctcgcaccgcgctcacgggtggcgacagggccccgccaagtcgtatcgatgcgagcttctcgagaattgcctcgtcctggatgacgaaggaggagtgaaatgcaccatcagcctcaatgattgccaagtcgcgatccggatggatggtgccccaaaaacggaattgagaatgtaccagtggtgcagcctgcgccagggctatctgacggctgacaccggcatcacgagcttcaaccgggcatccagtgggctcggagtcgccgtccgggactcgtccgagattgtcgccgcgggccttcccgtcatccctgacacaccgatcacatggagtgagggtgacatcacggttcagctcgatccctgcggccgcgcctccctgatccactcgaccctggtggaccgaagaatccacttggacgagtctggctcggcaagtctcaccatgaccgtgtttggtgattcccagccccatcgtgccgacaccgtcgagctgcctcccctcgcggcaggcaccgacaggatcgtcctcaagccggctgccggaggcgtgaccacatggcgcttgggcgccaccaaggtgctcaagtcaccgtggccacacgcccgcgcgctcgggcccaatccgatctggcgagccggcctgtgggtcagtcacgagccggatcgccacgaccgtcgccaaggaatggggtggggtcccgatcatcgcagttggaccctgtcggaagacaccatgaccagtactgacgggacactctcctggcgcttcagcggctcccccgacaccggctggacggtcgacgtcacgacgagcaacacgcacggggagaccgtcgtctggctcaccccggactgcccggcgggcgagaggatccgcacgtctgatcatgccgtgacgaccatgcttgacatctcgaagccatggcagcgctggaccacccgatgcgcaattcctctcagacacgggaagtggttcctcatcgagcctgatcatgacctcactgattcccccgaaatcctcatgcgctctgttcacggggtcctgctcgtcggctgtgtcggacgagcccactccggatccgcttcctggcgctttgccatcacgtcagaactccccacctccaacccaagaagaaacgactacacctcagccgcctgaacccaaccagttggaacacccactacagaagaaatggagcaccaccatgtccatcactgagcagtacaagacccttcgcacctcggtcggcctccacacgcctaccggtcccctggtccgtatcaccggtgatgatcgtctcgagtttctcgacaccttcctgtcccgcgcctcggacttcgtggaccccgacaccactcgggagtgcctcgctctcaccgaggacggccttccgctgacgatcttcctccacatcgagcgcgaggaggagtcatggctccttccccgcaccgccatcgatgcggcgaccctcgccacgtacctcggcaacctcgagaccgatggtgacctgtcaatcgagattgctccagagggttggggagctgtcgctgtcgaggggccgctgtcgtggcagatcgccgaaaaccttctcgacttcgacgtggctggcctcgttcttcacgccgtcacggacgtcgtcgttcccggggcccccgagggatcgaaggcatggctcgcccgggtcggaaccactggagagtacggctacctgctcgtctccaacgttcccgacctcgcccgcacttatctcctcagccgcgccacggagctgggcggtcaggcagtcgacgccgatgctctcgcacgagtccaggccgaggccgggatgccctattacgcgatgggcgtgtgccacctcgatgtcgccgggggtgacctcgcctggctcgtggactggcagcgcatcggcgagttccaaggatccgagaatctgcccacacccgtccgagaccagcgccgactggccgccatcgccctgcccaccggcaaccgcccggaagctggtcagaccgtcgctgccggggatgaggagattggagtggtggtgtacgtcaccccgtccgccaatcccgatgaggaactcgcgttcgcacttctggatgctcctttctggactcccacccttccgttgaccgtcggtgcccacgacgggaccacggtcaccctgccccgcgtcgtggcagcctccagcctcaacaagctggggtgacagcgatgacgatcactgctgagaacgccaccacccgcagcgacattgcccggagcattgcggtgaccggcgtgggactggtcacggcacagggtgaccataccgacgagtgctggaccgaacttgtcgatggggtttgcggaatcaccatgaacgtcacgttcgatgactctggcaccacgattccgtgtgctggcgtggctcccattccgaactctgattcgatcgaccgctgttacctgctcggcgtccatgccatgcgtgaagctctcgagatgagtggcatcgacctggactccgtgggtcgtgatcgcatcggactcgtggtgggctcaagcctcggcgcgatgcccaccttggaggcggctcatcgccgggccattgagaccggcgtgctcgatgccggattggcggcagactcccagctccactgcgtcgccgaccacctcgccgctgagttcgacatccgtggaccccgcgtcgtgacatcgaatgcgtgtgccgctggtgccgtggcgatcggctacgccgcagaactcctctggtccgacgatgtggacctggtcgtctgtggcggtgtcgatccactggcccagatctctgccaatgggttcacgtgcctgggagctctcgacaatctcccatgcagcccgatggccggttcctccggtctgactctgggcgagggagccgggttcatggtcctcgagagaacagatgcggcggctgccagaggccaggaggtgatggccgaaatcgccggctacggcacaagttgtgatggttaccaccagactgccccggacccgggtggcaatggcgcccgcagctcaatggaggccgccctgcgctcagctcatctcaagccgtccgacgtcagctacgtcaatctccacggcaccggtactccgaccaacgacgccgtcgagccgaaggcactccggtcattgttcaagtccgatgaccttccccctgtcagttcggtgaagggcgccatcggtcacactctcggcgctgctggcgccatcgaggccgtgtgctcgatcaaggccatccacgagggggtcctgccgccaaccgtcaacaaccgcgggcaggcttcccgaactggtctcgacatcgtgccggagtgcgcacgcaaggccgctcccgacgtggtcatctccaactccttcgccttcgggggcaacaacgcatcagtggtcatcaccgcacctcgaggaggcgttcactgtaccgccccggcgcagcttcgcgaggtcggaatctcaggaatggcagctctggcgggaaaggccgccaactcggaggagcttctttcggccctgtcagaagattgtccaatctggatggccgatgagaagacctgggaaggggatgctgtccaaaccggccatgtggacatcaagcgcctgtcccgcacaatcaacccgtccaaggttcgtcggatggaccccttgggaatcatctccagcgcggtggtgactgatctgtatgcccgacacgggaagctgagccgcaaggatgccgaaagcacgggaatcatcttcgcaaccggctacggtcctgtgacggcggtgacgcagttcaatgacgggatcatccgccacggttccgagggtgccaacgccctggtgttcccgaacaccgtggtcaacgcagccgcaggccacctcgcgatgctgaatcgctaccgtggttacacggccaccttggcatgcggtggaaccagttcactcatggcgctgcttctcgctgctcgcgtcgttggccgcggcgctgcggatcgcatcatggtcgttatcgctgacgagtttcccagcattgccgtccaggccgtcgcgaagcttcctggctaccgacacagggttgatggttccggagccgtgctctcggaaggcgcggtatgcgtcctggtggaggccgtcgaagtcgccgaagcacgcggtaccgcccccatggcgctgctacgcggcttcggatcccgtggagagtccgtgggagtcggtcacaccgcatccgatggacgggcttgggccaaggccatggccgctgcactgggcccggccggcctgactgcctccgacgtgtcgaccgtcgtggcggcatcaagcggacatcctcgcgtcgaccgagccgagcaggcggccaggcggatcgtcggactgtccgcaaccgctacgaccttcccaaaggcgattgtcggagaaacacacggatcggctgccgggatcgggctgttcggtgccctgtgcggttcgaggtcagccgcgcaccagaacatccttgtcaacgccttttcccacggcggtggttatgcctcgatggtggtggagtcactgtgaccacgacgcttctgccacgggttgcccagccgggaccgggcgtcagccatgtcgacaccgaccgtcccatcgagtgcatcatcacccaccacccccacatgccgcgtgatcgcggaggccacgccacctccgtgtcaggcaggtacttgctgcgccaagccgcagaactcatgctcggcacggatcctgcgcattgccccgtcgtcgacccttcgcggcgctggtactggcccggaatcaatcttcacggttctgtctcccatgtcccgggctggagcctgacgacgctgagcaccggcggccacatcggggcagacatccaggacttccgggagcgtcccggcgcaatggcattcatcggtgacctggtcaagctgtcgcgatcggcgtcactccgagaattcgcggagtgcgaggccgtcgtcaaggtgtccgaattgactaaggagacgttcgggcacgtgcgactgcccgaatggacacccggatggcgccacgttttcgaggactactgggtctggagtctcgagatgcacgggatgggagtcatcgcactcgcatccgatctcccccgagccattcgctggtggcggtgcgacgccgatgcccgtggccgtctccaggctctccgacccataagcagtcttggaccaggaaggccgtcatgagccggtactcacgtcgaatctcaggcatcgaacgcggctatctcaacgccgcaacccggggcccgcaccccaccatccacacgatgatcgacttcgagggccgcgtccccgccgactgttggcggcacgcatccacgattgcgtcggccgccaaccctggcatgacggtggtccggaggtcgggccgatggacatccgatccagcgggctgtccggttgtgttccacgactggaccgcggaccccaacgacgttgccgacttccacgctgacatggatctcgtgacgggaccatcgtccacgctccacgttttcgagggggcggaacgcacccgaatcaccttggcagcaagccatgccgtgaccgatgggcggggcatcgaacgatttctcgtcgacctgcttgcagcgttggacgagcgtgaacccattggaagccccgacaccctgaccgatgtcgatatcaaacgatccttggagaacagcatcaagccccgacgccacctggccgctgtgcccgccgatgtcctttctccactgggggggaggaagaaccaacgtatatgggcctccaggacgtggcacagtgccccgggagccatgagcggaagaatcgctgccgctgtggccgagatgatcgaccacgccgcaatgatcatcatcccggttgacatccggcggcacgtcccagaggtccgatccacagcaaacctaagtgcccaactgccagtgatcatcaccccgaaccagcgctggcaaagcatccatgggcatctgctcacggaccttgctcgccatcgagaccttgcgatcatcagtgaggatttccgccacaacaatccgttcgcatcgaccttggaggaaagccaggccatcggcctcgatggtgtctatccctgtgccgcaatcatctccgaccacgggaagctcgacctttcaaggttccagaccttggaactcaccccggtctcgatgcgaagcctcccgatgctcgttccctactccgcaatgttcatcagcagttgcaccgtcggcgagaccaccactgtcaccatcgctcatcgcgctgatgacgatcccgattccataaacaccttcttccaccacatcgaatcccagatgtccatctgagccacgtcgtccctggagagcaaacatgaccacccaagatgtcatcaccccgccgcgccccgtcacctcccatgccacggcgaccaggtccgaggctccaccgcgaagcgtcatcagagccatggccatctcgatggtcgcgaccctcatggtcatgctcgacacgaccgtcgtgaacgtgtccttgagcgcgaccaccgcccgcttcgggagcatgggcagcgtgcagtgggtcctcacaagttacctacttgcactgtgcgcgacgatgacggcctccgcctgggtcatcgaccgccttggtccacggctcaccttcatcgcctcaatgaccatgttcctcatcggctcggtgatgtgtgcactgagcgattcagtgtggcaactcgtcactggcaggaccatctccggtgccggagctgggatccttgttccgacagcatccgtcctgcttatccgtggcatcccacgcgaacaacttggcagggtgcaggcactgaatgggagtgtccagttgatcgctcccctgatcggcccgactgtgggcggtctcctcgttgacaggtgcgggggctggccggccatctactgggcgaacgtccccgtagctcttgttcttctgattgaggccgtccgcgtcgatccggacgaaccacacaccgctaagcgccgcctcgatgctctcggcctggtctgtggcagcaccgcgatcgtgctgacagtgcttggtgtctcactcttcggcaggacgtcgcgaaacaccaccttcctgcttacgatcggcgcgcttgcagtcctcgcatgggcgttcttcatcacccacatccgaagggctaccaaccctctgcttgacgtttccctgtatcagaaccctgtctattcatggtccagcttcaacgtagcggtgcttggtttcggtctctacgcccccatggtcgtcatgcccctctatctcgaggcgacgcgccacctcactgccgtccacactggtctggtgatgtcagtggccggcgtcggcgtcattatggccggaatcctgtgcacgaagatcatgggccggatcggtggaggcctcacgatgacagttggcataactctgagcatcatcgccactctgcccctggtccggctgacgaaccacacctcctacatactcctggcagtctgcttggccttgcgtggagcaggaatcagcctgacaatcgtcccagccatgacacgggccttcgagtccatcaagaggacggccatggcggacgcctctgcacagctcaacctgttgcagcgaatcggcgggacaattgcgacagcagtcatcatcgcagttatccaccacgaggccatgctcacccgcggactctcccccacagtgttctcgcacgccaacgtgtggatcctcaccgcgaccgccgtcacccttctgccggccttcgcgcttgcgaaggccgaaagacaacagcaggatctctgagcaccgaggagtactccctcgtagaccctcctctgatctaattgggttcgttccaagtgtgtatctcactccggggagccccgattgctgaaccacatcccgttcaccctggcgagtccctcgtggtacgacgtcccctgggcgcccggatctccgtatctcacaggagatatctcggtcctgccagcggactcgccaaggtggacgacgaccatccggggtccttggcaaatccacatgccacctcgtccgacccttccagaggtggggtggaaagtgcatgtgtctgccaagccatcggaattggaatcggttgcctcagtcgtagcactgtggtgcgtacgccacagcgtccccttcaaagtacttcgcacccgaggtctcgttcacgcgagtcaagtcaagtatgcggaccgaagtcagagcggcaaggtctgcacctgctaccccgacggcgagagccttgagcacttctgctccggtcttgccgagctgcttcagaacgtcgattcacctccggtgtccggcgagctgcgagtcggatcctcccctctgtggttgcgtcacgggagtttccgagaggcatgggcggtgtcatccacaggagtaccgttcccggtctacccgggaacaacacatcctgatcgtcgaggccccgcgcccgcagaatccgatcacgacacgccgtggatccggaggctccgtcggacgaatcgccccagcacggttcttcccatcgacgatgtcagactcctccaccgatcaaatgctggcggcgtgtatcaggcaacatggagagacggcacatcggtagtcgtcaaggaggcccggcacctgtccggacttgatgcggcgggtgtcgacgcccgagtgcggctgcgtcacgagtacgaggccctgagaagactggacccctatcgggccgctccccatcccattgatctcattgagaccgaggacggctcgttcctgatcatggaattccttgacggaatgacagtccaccaggagatgtcgaggttccatcctctgattggtaggcgacctcatcggctatcgatgaccgatttttcacgctggtgccgataggtcgaagatcgcttgaggaatgtcacgagggtcatggccgggtgcggaatcgttcacggggatcttcatcccgcgaatctgatacatgtcggccatgaggttttggttactgactttgaatcctgctcaatcgacggggtcgccgtctcgtcagggatcgccgctccctggttccagtcggacgacacgattcccgatccggcgacgactgacgatctccacactcttctcgtggatccgacttgcggccccgcgcttgtcctccatccaaatcttcgcgcgctcatcagccaggccgcagtcgaggacatgatgggaaatccgactggtttaccacatgcctggaacctcgaggacatgacaagcgaactcgccaaggggatccgggcatcagccactcccgcacgagccgaccgcctctttccctcagacccctacctgttcgggcatccaggttcagaattcggcctgatgcatggcgccgccggaatcatggctgctcttgccgtgactgggtacggtgttgacgcgaatcacgtgacctggatgaaggaccgcttggccacccgcccgaccctgctgccggggttggccaacggaatcgagggaattgccctgggtctctccctgtgcggtcagaacgacatggctgcatccctgctccaccagtccggaattctcacgatcacaacgaacggatcgactgacctcaccctcggtactggtatggcgggccgagcgtgcgcgctgcagtccctctcacaacgactgtcatcgaaatctctcgcccacgctgcatataccctctgggaacaactcgccgtggctgtgcggaacactgatgtggccttgccgaacggcctgttctccggttgggagggaatcgggctctccctgcttgcctctcccctgccggatcgtcatgatctcgcccgccactcactccgactggccctggccacgacaacgattgttgacggtgcgctcttctcaggcgagggacagatccgatggccatatctggggcgtggtcccgcggcatgtggcccgctcgccgccaggcttgatgatgaccagacggccaaggccgtggcacagacctgtcgttgtcccctgactgagtcatccggtctccacaatggccgcgcaggtctcctactcgtcctccgccagctcgtgggagaccaagacgacgccgttcgccgccacctcatgagactgtcgtggtcgatggaccgtcgcgaggaaggcacattgctgctgggtgatcatggcctgcgtttctcatccgatctcgcgacgggatcagccggcgccctcctcgccctgagcagggacccatggcggaacatgacacgaatgctcggaatatgcgatgacacctgtcatggcccactagtgacagtttgatctagcgccgatagttcacaactgaaagactccaaacatcgaggaaaacatgctgagccaaaacgccttggcaggcgtggctcgtttcaccacgatgaacaccaggagacagaatgtccgttgaggccatgcaatccatcgagatggacgaggaaaacagcgccagccagacagtttgcgcttgttacagcttcttctcgtggtcaggatgctgcgtagtctcccaagcggtggaagcatcttgatcgtgtgagacgccgtcgactaccctgtcccccgtggtacgcacacgccccgtcctggacagtcccggaagaccgctcatcgcctccggagtcgtcctggcggtcctgctcatcatcgcggtgatgacgatggtgcttcagcgcgaccccactctcacccccggacgccgcattctcggtatcgtcctgtccacggtccaggccgtcggattcatgtggctgcagacccgcatggttcgtcacggcaagggttcgcgcaacatgcgtgcgacccttggaagggtcggtttctgggccacgtggggactcgtcgcagtgggagtcgtcaatctgtggctgaccaactcgtggaccctcttcggggcctccgtcgccacgcccctccttctcctgccaggggtgtggagtgtggtggccaccctcgtgaccctgatcgtcggtttctccgacctcgtggtcacccacacctcgccactgacctcagccacggtcgtgctggtgaccatcgcggtgtcggtgaacctctacgcattcacgaagctgtcgacggcactcgttgaactccgctcctcccaggaggagatcgcccggctgcgcgtggacgccgagcgtcaccggatatcgcgggacctccacgacatcatcggtcgcaccctggtcgccacgtcgatgcgccagcaggcggccctccacctcgtcgaccgcgacccgcaacgggccaaggaacagctcgacgccgcccatgacgcaatcaccgaggggcagcaccagttgcgttccatcatccaggccgagatgagcaccagcctccccgacgagatcagcgacgccacattcctgtgcgaccgactccacatcgacttccgcatggatgaccgcggcagaccgcacaaacccttcgactcggcggcggcggcggccctgcgcgagggaatcacgaacatgctcaagcacagcgcggcgggctactgccacgtcgccatctccccggacctcctgaccgtcaccaacgacggttgtccgcaatcacctcgcccctccaccacaccgggcaccggaatcgaccatctccggtcccagatcgaggcgctcggtgggtcggtgacgacgtcgcggccctcgcggggcaccttccggctccgctgctccttcccgacccggggggcgtccacgaccacacccgcgaccgaaggaggacgatgacgacgagaatcctcctcgccgaggacatcaaactggtggcagaggccttcgaggcactgctctcggtggaaccggagttcgaggtcgtcgcacgggtggcacgcggcgacgacctggtcacatccgccacccgcctgttccccgacgtgatcctggccgacatcgacatgcccgggatgaccggcatcgaggccacccgaatgcttcgcgacaagggataccgcggcagaatcatcctgctcaccgccctgccgggaagcgggcacctgcacgccgcgatggctgccggagccgacgggtacctgctcaagtcgatcaccgcgccctccctcatcaacgccatccgggcggtgtgcaacggccagtcggccatcgacccgaacgtcgccgcggtcgccatgcgcaagggaccctcgcccctcaacgaccgggaaaccgagattctgcgcctagtcgccgacggttcctccaccgcgcagatcgcctcgcggctgtacctcagcaagggcaccgtcaggaactacctgtcgacggcgatgtcgaagctcgacgccgactcacgcacagcggcggtcacgcgggcacgcgaggagggctggctgtagcaggcgacccgctcagcccaccgcccctcagcccgccgactcctgacgcacggcctcctcgaccgcccggctgagcagggacccggccctgaccatcgacgtctccgggtccggctcgaggtcggacaacgcgatgatccggtcgaacgcggaccgtttctcctcgggcaggtcacagcgtccgcacaccgcccagacgggcaccccggcgtcccgggcgatcttgcggatggtgtcgggaagcttgccgagcagggtctgctggtccagccgcccctcccccgtgacgacgagactggaggcggagatccgcgacaccgcgcgggaccatcccaggacgaccgccgcgcccgggcggtacctggtccccaggcacatcagcgcccagccgacccggctgggcggctgcgaaccccctggccaccgcccggcaggcctttcccgaactcagcgaccccttgaaggagtcgacggcaacgatgaccggcgcattcggatcaggacgcatgggatcagcatgtcacgtcgatacggagcagtcgcgccgcctacccctagactcgggggcatggtcaaccgagtctacctgtccctgagcgttctcgccctcgtgctgtgggtggtcgcctaccgtcacatgccgggctgggccgcgggcatcaccctggtgggcatcgtcgtgctgtcgctgtggtgcgagtggtcgcgggtgcgcaccctggccaggatcggcaagtcccgccagcagggcccccgctcctcccgaggacgcaacctgtcgtgagcaatacgattcccgcagccctccaccccggccctgacgaggcc

SEQ ID NO: 431 - DNA, 26620 bp, Propionibacterium acnes; identical to SEQ ID NO: 430

SEQ ID NO: 432 - DNA, 26636 bp, Propionibacterium acnes
ccttgtggacaccacgtcatccacatgacttgtgtcacatgattcccggaccatcatcaagcagatgctcacccaactgtaatgatttctgttctgaatctggacatgctctgacctgcattcaatgatcaattccgtgcgatattccacaacgcacggagaggtcgcagacaatgacaacagaaagcatccccacgcggctgctcgtgtggcacgagcagaccgatccgaccaagctcctcaggatcaccgacgcgatcaggaggggggatccccttccccccatcgaggccatggcgatcggccacaaattcctcgtcctcgacggtgcgcaccgggcccaagcccaccagtactgccatcgatctgagatccgagcccgcctccacaacctccccctcagcgcggaagtaccaggctggagccactccataccccgcgatgcagcagcgaaactggctcacctactcctccccgtggacgctctcggtcaggcggaacatcgtcctgcacggggtgcgccgtcaggtggggaccgcttcacaacgaccgcgcgacatctttctcgcctgccaccggatcgcgcgagttgcctacgcgcatggaatcagacctctcggcccggagttctccaacgctccgacgatcgacgccgccaccatgacctggcccccgccgaacgtgggcacgttgtgggccatcgccagcagtctcggacccctgcccgcaactgtgacccggttcgccccgatcctccggcacgacgccatcggggattccgcgatgacacccgtcacctccgccgcgtgacgacccgcgccaattccgccccaccactggatgaggggcagccgcgtggacgatgctcctgttcaggcagggactccatacgagaccaataggaaaatcatgatcaaaaacacaagccctctgaccgtgaaaaatgtctcgaaaacattccgtggctccagcggagaagccatcaaggccgtgcaagacgtgtcattcaccgttgagcgtggtgaggttgtggcattcctcggcccgaacggcgccgggaagtccaccaccatcgacatggctctcggcctcacccgccccgacagcggccagatcgaggtcttcggtactgacccgctcagcgcggcccggtcgggacgctgcaccgcgatgacacagaccggcgggttgctgcccgacctcacgattgggcagaccatggagatcatctcctcgctctatcgtggctcccacatgaatgcctgcatggagcgagcaaggatcacgcatctggccgatcggcaggtgtcgatgtgctcgggaggcgagcgccaacgacttcgcttcgcactggctctgctgcccgatcctgacttcctcatcctcgacgagcccactgcggggatggatgtggaggcgcgccgggacttctgggcagagatccacgaggacacgcgtcgtggtcggacaattctgttcgcaacgcactacctcgacgaggtggacgagttcgccgatcgggtcatcctcatcaaggagggccgcgtcatcgccgacgacacctccgacgcgatccgcaccatgtcggggggttgcaccgttacggcgaccattcccgacttctccctggcacgactgaatctgccgggcacccaactcatcaagcagggcggcgcacgcgttgatctgcaccatcccgattccgatgccctcgcagcgcgagtcatccagctcggcggcaccgacctgcgcgtggtcccccgcagcctcgacgacgccttcctcgctctcacctcaaccaccaaggagtcctgacatgaccgcccaagcgcttcccgcagtcgccactcccaaggcccgccaccgatccgccatctcgctgaagtacttgtggtgcgagatgcgtcgccccttccggcgttcgacgatgctgttcaacctcgccctccccgcagttctgtacctggccctgttccgcaccgtccacaccgccgagctgccggacgggaacttcgcgatgtggatgatgatcggcatcgctgtctacggagcggccactgcgagcaccagctacgcagcctccatctccgtcgacgaggccaacgggtggacccgcaccatccgcctgacgccgttgtcgtcggtcgggtacgtgctggtgaaggtcctctgcgccatggccatcgccctggccccgaccctgctcatcggtctcatcgggctgttgaccggagctcacggcacgctgcgggtctgggtaatcggactgggggcggcttggctcagctcagcaatcttctccgccttcggcctggctctcggactgtccctgcgtcccgaggtcgtcatgcacgtccccggcctggtcatcaccggtctggcgttcctgggcaacgtcttcgtccccctcagcgggacgatgctcaccattggccgctggagccccgcctacggcatcaccgcgctggctcgttacccgctcaccaacggcatcgacatcgggggcggccacgactccctgacggctgccctcatcggcaccttctgctggttcgccggattcgtgttctgggcctcccgtcgatttaccaagagcacgggtcgtcagtgacagattcggccgatctccggaaggagcagtgttatgaccaagcccctcattgcagtggtcaccgcgggccaaggagcgcagaagcctcgcctgctcacgccatggctcaaggtccccggcgtcacggagaagcttgctgcatggtccgctcaggccgatgtggacctcgtcgagctcggtaccagggcgaatgcagaaaccttggcagcgaccgagaatgcgcagccactactggtctgtctcggagtcctcgtctcggatctcctgaccgaccagaacattgtgctcgcaggacactccgtgggcgagctgacagcagcgtgtctcgccggggtagttgatcccgggacggccgtcactcttgcacgacggcgtggactggccatggcgcgggcctgcgctctccacccgaccaccatggcggccatcattggtgacaatccggatgacgtcctccggcggctctcggaactgggactcacggctgccaacatcaacggaggcggacagattgttgcggccggctccaccgacgcgatcgcggaactggtggcgacccctcccaacgggaccgcagtcaagccgttgcgagttgctggcgcctttcacaccaagtacatgacacctgcgcaggacgctttcgcccaagctgctcaggacgtcaccttctccgacccgcagcacccgatcatctccaacctcgacgggcaggagatccggtccggcaatgacctgcgtgaacggctgattgcccaggtgaccgcgccagttcgatgggatctctgcatccagcagatcgcggatcgtcagccggaactcgccctatcggcccctccggggaaggtgcaggcgtcgctcttgtctcggcagatcccggacctcgcgacggtctgcatcaccacaccacgggaggcagcccaggctgcacagcggatcgaccagtccgtatccgtccttcagggggcatgatgctcatccccgagtacttcctcacagcctgttcggaccatgctgagcgcctggcgatcatcacccacaatgacgttgtgacgtgggccgaactggcgactcgcgtcgacggttttcggcgctggctgcgggaccatggcgtgcaccgccaggacagggtcgttctccagacgccaagcaccgtaggcacggtagccctcatgtgggcctgcctgctcgacggcgtgacgatggtcccggtgcaccaggacctcactgcctcccaggtgcagcaagtcatcgacgactgccgtccagctctggtgtgtggcagcccggacctcgtccaactcctcaactcccccggaatgaagacaagcacacctccaacgcggccggagtcaacgagtattctgccgtccttgtcccgggtcagccccgatgaccttgcgatgctcatctatacgtccggcacgacgggtctcccgaaggggatcatgtgtccccaccggcaggtcgccaccgccgcacggatcgtccatgactgtctcgggtaccgcacggacgacgtcattctctgtcgcctgccgttgtccttcgactacgggctctatcagattctgatgtctgccatctccggtagcgcggttgtcctgcgggacggaggcgcgcaggaccgcaacctggtgcgcgacatcgcccgtcacggcgtcactgtcgttccagtcgtgccgtccatggcgtcaatgctcatcaccctgcagcgtcgtgatcagttgccgaccatcgtcagactgttcacgaataccggggcgcgtctggcacccgagaccgcgaaccagttgctcgcaagcttccccggctcccgctatgcgtcgatgtatggcatgacggagtgcaagcgcatctccatccttccggtggaggagtacgagacgcatccggacagcgtgggaagagctctgcccagcactcacgtcgagatcgttgacgctcagggagttccggttccggcgggcgagcacggggagatcacggtgtccggcccgaccgtgatgaacggctactggcaggtgccgaacagtcccagtggacgattccgacccagcggccacggcctcactctgttcaccggtgatcgcggctggatggatgaggagggacgtctctacctcctcgggcgcgacgacgagatcgtcaagcatcacggcatccgaatcagcctgcaggagatcgagatagccgccgaagccgcgccgggcgtcgacgcagtcatcgctctcaagccggcctccgactcggcccccattgaaatcgcctactgcggcagcacgagtcccgagaacctggcccgccatctcgaaaccgtcctggaccgggcgcgacgaccccaattcatccaccaactccagcagatccccctgacccgtaacgggaaaccaaaccggtcagcagccgccgaggccatccgctcaagggcgtgacggcgaaggccaacacccacagacgaaaggaaaccaccatgacccaggccgagttcaaccagttcatcgagtccacctgctccgcgacgatcgtggatcccgaccgtcctttggtcgatcagggcatcgactccctcggaatgctcaccctcatggtcgctatcgaggacagcctcggcatcgaactggatcccgagtccctcgccgacggtaggggttccacgccctccggtcttctgtcccttgtcgagcagctgaaagcgacggtgtgacgacatgacgacgatggttccttgccgccgtgtggagatgccgcaactgttcgaccacatccccggaagcatctctctctcaggagggctgcccgatctgagcgtgctcccgagcaatcagatcgccgaactgacgtcccggatcatgcgtctcggctcaagaatcctcctgcaatactccaccccttcggtctcgtcctccttggtgccggccatcctggacctggcggaacgaacatgcatgtcaccggatccgcggaatctgatcccgaccgcgggttcccaactgggcctggccatggtgatcaatgcctttgacggcgatgagatcatctgtgactgcgccacctatcccggggcgctggccgccttcgcctctgccggcgtggaaacaacgggggtggccagtgacgaggaggggctcaacccagacgcgctcgctcacgccgtcgcagagggtcgggccaatggccgccgcatcgcagccgtctacaccacgcccaccttccagaatcccaccggctccgtacagtccgagaaccgccgtgcggccctgctcaaggtgtgtgctgacaatgacctcctcctcatcgaggacgatccgtacggcatgctgtccttcgacgggcagacgtggccagctctgaagtccatggacccacagcgcgtcatctacctgggcaccttctcgaaggtgttcgcaccgggcgtccgttccggctggatcgatccgcccgccaatcttgtcgagaaactccgcgctgtgtgcgagatcatgacactctcgccatcagccctcaaccaagcgatcatcggcgagtaccaccgtcgtcacggatgggacgaactgttggagggctatcgcgcctcctaccgcgaccgagcccgtctcctcatcggggctctcgaggctgaactggcaagaacgaattgcactggcacgtggacctggcgtgaaccacggggcggcttctacctgtggttggagaacgtcgccagcaccagcggtatcgacgttgcgcgtcgcgccgccgacaacggagtggccgtggtgcccgggaaacacttcgacgcagccggacacgattcgccgagcctgcgggtgtcgttcagcaattcacgcccggctgatctggtcgaaggagctcgtcgtctcgcccgtgcactggtgggagaggacgttcagaaatgactctcgcgacacgcaccgccaccgacaccctgcagcagaccttgccctggggcacccacgaacgtctcgtcttcgggcgggcgctcctgcgcagcaccggcttcccagccgaaggcttggccctgctcgactccgacgacatcctccccctcctcgactcctttcttgccggggacatcgacagaactcacttcgagaaggaatacaccagtcgcgaggagtccggcgcaagggcgctcatcaacgtcttgaaggacgatgcagtatcgcgcgccatcgcatggcagaaccccaccgcgtggaggtccttcgaatccctgtcgtccacgagcggaatcaatgcttcgactcggcgcaaggtacgccaactcgccctctactggcaacgttactgttccaaggctgagaccattggatacttcggcccgttcgcctgggccgaagtcgacccggaggcctctgcggtcgaattcatctcctccgaccatctgatcgaccgttcccacgtcgcaatggaggcgtgggcggtcattgagatcgggaaagccctggcatcacgggccgaccttcagtggtggatgccaccaatcctgtcccccgccgtcgacctcaacatggagagaggcaccgtgacggtggctggacaccagccacgacgggtccgggaggacgaggcacgagttctcttcctgaccgacggcacccgtcccgccgcccagatcgccaagagcctcgacatggagcccgagcggttgcgcaggatcctcgtggcccatgaacgtcgtcacaccgtgatctgggacgccaacatccctgtctcagtgcacgcgtgggacatcctgcacgaacgcattgcccagatcggagacgctgggctgcgagatgaggccactgctgttctcacgaggttcgacgagcttctggaggtcatccgcaacattcccgacgcccggtccctgacggaggcgacggaatccctgtcccgtcttttcgaaaccgtgacaggaacctcttcgaacagacgtgcgggccaggcatatgcagcccgcagcctgtgctacctggactgcacccgcgccggaaccgccaaggttgggacccggcttctcgaagccctcgacgcccccctcaacctcgtcctacaatccgctgactggttcgcggcgaccttggcaaaggaatacaccaccgaaatcacggacctcgcaaatcgaaagcagcgggcctcccaccagccactgaccatggctgatgtctggccgtccacgatgtcgctgttctggggggactcaccgtccccactgcagcgagccgtgaccgaactgtcacggcggtggagcagagtcctcgaggggctgcagccagtcgacggtcgcatcgacacgacatcgtccgctctctcgggcgccgtggacgagcagttccccgtgtgcaccccgattccagaactgtcagtgcacagcccggacctccaggtcatcacctcgagcactagcaacatcgcctccggacgagtcactgcagtcatgggtgagctacatgcctgtctgagcagtctcgacatgccgttgctcgagtggtcgctgccccatggttccattcgcgatcgcatcaacaccgcgctcaacctgcgacgtctggttcccttgttccccgagacatggaggcgcaacaccggccgcatggttccagcgacggtcggagtgggggatcgcgcaatcgggttcactcggacggccgatcaagaccgtgcgaacacatggtcgatgtcggcactgctgttcgagcagaccgaggacggactcatgatccgtgatcccgatggcaggctctggaccatcgcacaagcgtggagcgtgcccatctccatggtcgccgccgatgcgttcaagatcgggctgcccggctcaccagcccctcggctcaccattgacaatctcgtcgtgttccgtcgtacctggaggtttcccgctggctccatcgacatcatgcacggttcagccgccgagaaacacgctcggctgagggagtggcaggtcacgaatcaccttcctgaccacctcttcgtcaagttcccctccgaacccaagccgatctacttctccttcgagtcccccgccatggccacggtcttcacgcgatcactgcagcgcgacgcccgagagaatccagacagtctcgtgacgatgtccgaagcactgcccgagcctcaatcctcatggctgcacgacacccggagccaccactacgtccacgaattccggctgcaactgaccaaggagcgacatgacgaccacagttgagacacatcccgaaacacgtggcacaaccgcgacatccatctccaatctgatcggtcacacccctctcgtaagaatggaccatctgttcgacggcctccccttcgaggtgtacggcaagctcgagaagctcaatcctggcggaagcatcaaggatcgagcagcacaatccatgatcgaacgggcaattcgacggggtgagatcgtcccgggccgtacgaccgtcatcgagtccagttcgggaaatctcggcatcgccgtggcgatgctgtgccaggagcacggcctgaatttcatctgcgtaaccgatgccaaggccacgccaacgaacattcgactcatcgaagcgttcggggccactgttgaggtgatcgaagaacctcatcccgagagtggcgaattcctccccatgaggctcaagagggtaagagaactgctgtcagagattccagatgcatggtggccgaatcagtacgggaaccccgacaatccggcggctcacgagcggactgtccgcgagatcatcgaggcaatcccgcgggttgacacgattgtctgcgcgaccggctcgtgcggaacccttcgcggctgccacgaagcattgcgaaagctgtccccacgcacccgactcgtcgccgtggacgccaagggcagcgccatcttcgacgaggcaggagcaccccatccccgctgtgtcccgggacacggtgcgtcagtgcgaccgccgctgtggcgcgcggggctcgccgaccaactggttctggtctccgacgcggactgcgtcgtgggatgccaggaggccctgcgcaccgaggctcttctcctcggcggatcctcgggagcaattctgacggccattcaccgagtgtctcccacgattcccgctggttccaccgtggtgacgatcctccccgacggcggcgagcgctacatcgacaccatctacagccgctcgtgggtcgactcacacatccccgggctgccctctctcgccgactggggggctcccaaccccgccaattcgtatgacctgaacagaagtgcctcatgaagctctacaccagagagaccgtcgaaactgcgcttgtcgggcgtcatggccaggttctcagtgccgtacagagtgcatacatgctgcattcgacgggagagacatcgctgccattctcaaccttcctccgcccggccgggtatccgaacgatcggatcatcgcacttcccgcccacatcggaggcgacttcgacatagccggtatcaagtggatctcatccttcccggaaaacctcgaccggggccagcaacgagcttcctccgtactcatcctcaatagtctggagacgggatacccgaccgccctgctggagtccagtcagatttcagcaacgcgaacggcagcatcagccgccctggccagcgccaccctccatggctccgaagaccatgtcagcacgattggcatcatcggctgcgggacaatcaatcttgcaacgatcgactacctcttccacgtgcacccccagatcaacgaggtcctctccttcgatctgaggcgggagcgggcccatgagttctcgcacctcgtcaaggcttcgcacccagaggcccgggtccgtgtcgccaaggagcccgacgagattctggccgcaagcaacaccatcgcgatcgccacgaccgactcgagtcattggttggaccttccgccgtggcacgggccggggcaccaagtcgtcctgcacacgtcgctgcgagacctgtcagtgccctcgatcctggcagcggccaacgtcgttgacgatcctgatcacgtctgccgtgaagcgacgtccttggatctggcaactcagcagaccggcaaccgggacttcatcacggggagaatcggagacctccttcttggcgcgccgctgtcctcaagtcctgactcccgtgtcattttctcacccttcgggctcggcatcctcgacctcgcagtcgcctccgtcgtcattgctgccgcctcctcttcagcagtcgagatcaatgggttcgaccccgggaaacacgccacaagcatgattgaggtgaatcgatgaccaccacacagatcaacgacaacacggccgttctgcgcgacgtattccccgccggctccgtcgcattcgtgagcggtgcctcacgcggaattggcgctgcctgcgcgacagcccttgcggccgcgggatgcaacctcgccatcacttatcgaaggaaggagaacgaggcggcacaaatcgccgaatccattgaagccatcgggcgccagtgcatcacaatgcagatggacgtaaccgatgagaaccaagtgaccagagccttccgcatcattcgccagcattacggacgcctggacgccgcggtcttgaactcgggaatcaccagtgacgggcatcttgcaacaatgagccgctccaagtggagctcggtgatcgacacgaatctgaccggaaccttcctctgcacgcgcgaggcgaccaaggccatgtactcgtccggtggctcgatcgtcatggtcgcgtccaccagtggagttgcagggcgaccgggccaggccaactacgcagccagcaagggcggaatcgttgccatgatgaagacgctggccccggaggttgcggcaaagaacgtccgggtgaatgcggtggcacccggcttcattcagaccgacatggtggcggccgttccaaaagcggcactcgcccaggcaatccaacacatccccatgggccgtcttggcctggcacaggaggttgcgtcagccgttaccttcctggcctccccgctcgccgcctacatcacagggaagaccctcactatcgatggcggaatgatcaacggctgaccccaggacccggacacccccagtaccgagaaaggaacaacaatgaccgagatcacccacactgccaacagcatccgaacccgcgccgaggaacgttccaacaaagcttggcgcctgaaggaggagatcatctccaagctcggtctcgagaccaagccagaatatgtctcggacaaccaaccgctcttcggacgtggccttgagatggattcccttgacactctcgaagtcgtcgtcgccgtcaacaatgagttcggagtctcggtcaacgacgacgacgtacaggcgttcggctcgatcaatgccatggtcgatttcatcgaggtgaacgagaagtgagttctcttgcgctcgaggcgccacccaaggacgcccgtaagaaattcgcctacgacagcgatgccatcaagacgatgctcccacatcgttggccgatgctcatgattgatcgcgcctacgacgtcgtcccagggaaatcgggcaaaggcatcaagtcggtcagcgtcaatgagccgttcttcgccggtcactaccctgaccattccatcatgcccggcgtcatgatcgtcgagtcgatggctcaactcgtggccgtcatctacgtagccgaggccattcagaacaatcccggcatgacgtcgcacgacgcacgttcaagcgttggttatctcggcgcgatccatcagatgaagttccgacgcctcgtcactccgggcgaccaactcaccctccacgcccagctcggcgagaaagtgggggctctgcgcgaggtttccgtgagagcactcaatggccgggatgtcgtcgcccagggggaactcgtcgtcaccgagcggtgacacccagccacacacgagaaggaagtcccatgatcgttcgcccctacaggccacgtgatgcggaagcgatcgtacatctctacaacagccattccgactcccccaatccagtgtcgggagggattgttgaggaggagttccagagggagctcgaagaacgtggttcgacagtgttcctagtggccgaggaggccggatccattgtcggcacattcgggatgttccgcacgaatggccgacacaccatggccgatgatgaagtcttcgccgacatgttctatgtcaccccgtcacatcgactctcgacagttccgggacagctaatcactgaagccatcagcgagtgcttcatccagggcatcaacgtgatccgcctcaccgtgaaccccgcgaacatctccgcgctcaaggtttacagaaaagtcggttgtgcctgtctcggggccaccgatgcaggcgaggacgggaacattgagctgtacaacttcatccctctggttcttagggcaaccatcaccaaactcgaccacgattgtattcgagccctggcggacatgacttcgttcgcctgcatcaccgagggacgtccacttgatctgtcccacgacttcatcgtggacgctggacggaagatcgtctcccacagcatccagatcgggcgttcaaccatccacgccatggtcgacacgggctcgaggaccattgtggaggccaccctcgacaaccgcgactgggatgctcctcgccagatcgtcgcccccaccccctgtcagaaccggcccgaggaacagcgaggcaaccctgtccggctggtgcacaagaagcttgaggtcaccttcaacgaaggagtcattgagatcagtacgactggccactggggcccggtcctcgcaatgtcctggccctcctccgtctcgcaccgcgctcacgggtggcgacagggccccgccaagtcgtatcgatgcgagcttctcgagaattgcctcgtcctggatgacgaaggaggagtgaaatgcaccatcagcctcaatgattgccaagtcgcgatccggatggatggtgccccaaaaacggaattgagaatgtaccagtggtgcagcctgcgccagggctatctgacggctgacaccggcatcacgagcttcaaccgggcatccagtgggctcggagtcgccgtccgggactcgtccgagattgtcgccgcgggccttcccgtcatccctgacacaccgatcacatggagtgagggtgacatcacggttcagctcgatccctgcggccgcgcctccctgatccactcgaccctggtggaccgaagaatccacttggacgagtctggctcggcaagtctcaccatgaccgtgtttggtgactcccagccccatcgtgccgacaccgtcgagctgcctcccctcgcggcaggcaccgacaggatcgtcctcaagccggctgccggaggcgtgaccacatggcgcttgggcgccaccaaggtgctcaagtcaccgtggccacacgcccgcgcgctcgggcccaatccgatctggcgagccggcctgtgggtcagtcacgagccggatcgccacgaccgtcgccaaggaatggggtggggtcccgatcatcgcagttggaccctgtcggaagacaccatgaccagtactgacgggacactctcctggcgcttcagcggctcccccgacaccggctggacggtcgacgtcacgacgagcaacacgcacggggagaccgtcgtctggctcaccccggactgcccggcgggcgagaggatccgcacgtctgatcatgccgtgacgaccatgcttgacatctcgaagccatggcagcgctggaccacccgatgcgcaattcctctcagacacgggaagtggttcctcatcgagcctgatcatgacctcactgattcccccgaaatcctcatgcgctctgttcacggggtcctgctcgtcggctgtgtcggacgagcccactccggatccgcttcctggcgctttgccatcacgtcagaactccccacctccaacccaagaagaaacgactacacctcagccgcctgaacccaaccagttggaacacccactacagaagaaatggagcaccaccatgtccatcactgagcagtacaagacccttcgcacctcggtcggcctccacacgcctaccggtcccctggtccgtatcaccggtgatgatcgtctcgagtttctcgacaccttcctgtcccgcgcctcggacttcgtggaccccgacaccactcgggagtgcctcgctctcaccgaggacggccttccgctgacgatcttcctccacatcgagcgcgaggaggagtcatggctccttccccgcaccgccatcgatgcggcgaccctcgccacgtacctcggcaacctcgagaccgatggtgacctgtcaatcgagattgctccagagggttggggagctgtcgctgtcgaggggccgctgtcgtggcagatcgccgaaaaccttctcgacttcgacgtggctggcctcgttcttcacgccgtcacggacgtcgtcgttcccggggcccccgagggatcgaaggcatggctcgcccgggtcggaaccactggggagtacggctacctgctcgtctccaacgttcccgacctcgcccgcacttatctcctcagccgcgccacggagctgggcggtcaggcagtcgacgccgatgctctcgcacgagtccaggccgaggccgggatgccctattacgcgatgggcgtgtgccacctcgatgtcgccgggggtgacctcgcctggctcgtggactggcagcgcatcggcgagttccaaggatccgagaatctgcccacacccgtccgagaccagcgccgactggccgccatcgccctgcccaccggcaaccgcccggaagctggtcagaccgtcgctgccggggatgaggagattggagtggtggtgtacgtcaccccgtccgccaatcccgatgaggaactcgcgttcgcacttctggatgctcctttctggactcccacccttccgttgaccgtcggtgcccacgacgggaccacggtcaccctgccccgcgtcgtggcagcctccagcctcaacaagctggggtgacagcgatgacgatcactgctgagaacgccaccacccgcagcgacattgcccggagcattgcggtgaccggcgtgggactggtcacggcacagggtgaccataccgacgagtgctggaccgaacttgtcgatggggtttgcggaatcaccatgaacgtcacgttcgatgactctggcaccacgattccgtgtgctggcgtggctcccattccgaactctgattcgatcgaccgctgttacctgctcggcgtccatgccatgcgtgaagctctcgagatgagtggcatcgacctggactccgtgggtcgtgatcgcatcggactcgtggtgggctcaagcctcggcgcgatgcccaccttggaggcggctcatcgccgggccattgagaccggcgtgctcgatgccggattggcggcagactcccagctcccctgcgtcgccgaccacctcgccgctgagttcgacatccgtggaccccgcgtcgtgacatcgaatgcgtgtgccgctggtgccgtggcgatcggctacgccgcagaactcctctggtccgacgatgtggacctggtcgtctgtggcggtgtcgatccactggcccagatctctgccaatgggttcacgtgcctgggagctctcgacaatctcccatgcagcccgatggccggttcctccggtctgactctgggcgagggagccgggttcatggtcctcgagagaacagatgcggcggctgccagaggccaggaggtgatggccgaaatcgccggctacggcacaagttgtgatggttaccaccagactgccccggacccgggtggcaatggcgcccgcagctcaatggaggccgccctgcgctcagctcatctcaagccgtccgacgtcagctacgtcaatctccacggcaccggtactccgaccaacgacgccgtcgagccgaaggcactccggtcattgttcaagtccgatgaccttccccctgtcagttcggtgaagggcgccatcggtcacactctcggcgctgctggcgccatcgaggccgtgtgctcgatcaaggccatccacgagggggtcctgccgccaaccgtcaacaaccgcgggcaggcttcccgaactggtctcgacatcgtgccggagtgcgcacgcaaggccgctcccgacgtggtcatctccaactccttcgccttcgggggcaacaacgcatcagtggtcatcaccgcacctcgaggaggcgttcactgtaccgccccggcgcagcttcgcgaggtcggaatctcaggaatggcagctctggcgggaaaggccgccaactcggaggagcttctttcggccctgtcagaagattgtccaatctggatggccgatgagaagacctgggaaggggatgctgtccaaaccggccatgtggacatcaagcgcctgtcccgcacaatcaacccgtccaaggttcgtcggatggaccccttgggaatcatctccagcgcggtggtgactgatctgtatgcccgacacgggaagctgagccgcaaggatgccgaaagcacgggaatcatcttcgcaaccggctacggtcctgtgacggcggtgacgcagttcaatgacgggatcatccgccacggttccgagggtgccaacgccctggtgttcccgaacaccgtggtcaacgcagccgcaggccacctcgcgatgctgaatcgctaccgtggttacacggccaccttggcatgcggtggaaccagttcactcatggcgctgcttctcgctgctcgcgtcgttggccgcggcgctgcggatcgcatcatggtcgttatcgctgacgagtttcccagcattgccgtccaggccgtcgcaaagcttcctggctaccgacacagggttgatggttccggagccgtgctctcggaaggcgcggtatgcgtcctggtggaggccgtcgaagtcgccgaagcacgcggtaccgcccccatggcgctgctacgcggcttcggatcccgtggagagtccgtgggagtcggtcacaccgcatccgatggacgggcttgggccaaggccatggccgctgcactgggccaggccggcctgactgcctccgacgtgtcgaccgtcgtggcggcatcaagcggacatcctcgcgtcgaccgagccgagcaggcggccaggcggatcgtcggactgtccgcaaccgctacgaccttcccaaaggcgattgtcggagaaacacacggatcggctgccgggatcgggctgttcggtgccctgtgcggttcgaggtcagccgcgcaccagaacatccttgtcaacgccttttcccacggcggtggttatgcctcgatggtggtggagtcactgtgaccacgacgcttctgccacgggttgcccagccgggaccgggcgtcagccatgtcgacaccgaccgtcccatcgagtgcatcatcacccaccacccccacatgccgcgtgatcgcggaggccacgccacctccgtgtcaggcaggtacttgctgcgccaagccgcagaactcatgctcggcacggatcctgcgcattgccccgtcgtcgacccttcgcggcgctggtactggcccggaatcaatcttcacggttctgtctcccatgtcccgggctggagcctgacgacgctgagcaccggcggccacatcggggcagacatccaggacttccgggagcgtcccggcgcaatggcattcatcggtgacctggtcaagctgtcgcgatcggcgtcactccgagaattcgcggagtgcgaggccgtcgtcaaggtgtccgaattgactaaggagacgttcgggcacgtgcgactgcccgaatggacacccggatggcgccacgttttcgaggactactgggtctggagtctcgagatgcacgggatgggagtcatcgcactcgcatccgatctcccccgagccattcgctggtggcggtgcgacgccgatgcccgtggccgtctccaggctctccgacccataagcagtcttggaccaggaaggccgtcatgagccggtactcacgtcgaatctcaggcatcgaacgcggctatctcaacgccgcaacccggggcccgcaccccaccatccacacgatgatcgacttcgagggccgcgtccccgccgactgttggcggcacgcatccacgattgcgtcggccgccaaccctggcatgacagtggtccggaggtcgggccgatggacatccgatccagcgggctgtccggttgtgttccacgactggaccgcggaccccaacgacgttgccgacttccacgctgacatggatctcgtgacgggaccatcgtccacgctccacgttttcgagggggcggaacgcacccgaatcaccttggcagcaagccatgccgtgaccgatgggcggggcatcgaacgatttctcgtcgacctgcttgcagcgttggacgagcgtgaacccattggaagccccgacaccctgaccgatgtcgatatcaaacgatccttggagaacagcatcaagccccgacgccacctggccgctgtgcccgccgatgtcctttctccactgggggggaggaagaaccaacgtatatgggcctccaggacgtggcacagtgccccgggagccatgagcggaagaatcgctgccgctgtggccgagatgatcgaccacgccgcaatgatcatcatcccggttgacatccggcggcacgtcccagaggtccgatccacagcaaacctaagtgcccaactgccagtgatcatcaccccgaaccagcgctggcaaagcatccatgggcatctgctcacggaccttgctcgccatcgagaccttgcgatcatcagtgaggatttccgccacaacaatccgttcgcatcgaccttggaggaaagccaggccatcggcctcgatggtgtctatccctgtgccgcaatcatctccgaccacgggaagctcgacctttcaaggttccagaccttggaactcaccccggtctcgatgcgaagcctcccgatgctcgttccctactccgcaatgttcatcagcagttgcaccgtcggcgagaccaccactgtcaccatcgctcatcgcgctgatgacgatcccgattccataaacaccttcttccaccacatcgaatcccagatgtccatctgagccacgtcgtccctggagagcaaacatgaccacccaagatgtcatcaccccgccgcgccccgtcacctcccatgccacggcgaccaggtccgaggctccaccgcgaagcgtcatcagagccatggccatctcgatggtcgcgaccctcatggtcatgctcgacacgaccgtcgtgaacgtgtccttgagcgcgaccaccgcccgcttcgggagcatgggcagcgtgcagtgggtcctcacaagttacctacttgcactgtgcgcgacgatgacggcctccgcctgggtcatcgaccgccttggtccacggctcaccttcatcgcctcaatgaccatgttcctcatcggctcggtgatgtgtgcactgagcgattcagtgtggcaactcgtcactggcaggaccatctccggtgccggagctgggatccttgttccgacagcatccgtcctgcttatccgtggcatcccacgcgaacaacttggcagggtgcaggcactgaatgggagtgtccagttgatcgctcccctgatcggcccgactgtgggcggtctcctcgttgacaggtgcgggggctggccggccatctactgggcgaacgtccccgtagctcttgttcttctgattgaggccgtccgcgtcgatccggacgaaccacacaccgctaagcgccgcctcgatgctctcggcctggtctgtggcagcaccgcgatcgtgctgacagtgcttggtgtctcactcttcggcaggacgtcgcgaaacaccaccttcctgcttacgatcggcgcgcttgcagtcctcgcatgggcgttcttcatcacccacatccgaagggctaccaaccctctgcttgacgtttccctgtatcagaaccctgtctattcatggtccagcttcaacgtagcggtgcttggtttcggtctctacgcccccatggtcgtcatgcccctctatctcgaggcgacgcgccacctcactgccgtccacactggtctggtgatgtcagtggccggcgtcggcgtcattatggccggaatcctgtgcacgaagatcatgggccggatcggtggaggcctcacgatgacagttggcataactctgagcatcatcgccactctgcccctggtccggctgacgaaccacacctcctacatactcctggcagtctgcttggccttgcgtggagcaggaatcagcctgacaatcgtcccagccatgacacgggccttcgagtccatcaagaggacggccatggcggacgcctctgcacagctcaacctgttgcagcgaatcggcgggacaattgcgacagcagtcatcatcgcagttatccaccacgaggccatgctcacccgcggactctcccccacagtgttctcgcacgccaacgtgtggatcctcaccgcgaccgccgtcacccttctgccggccttcgcgcttgcgaaggccgaaagacaacagcaggatctctgagcaccgaggagtactccctcgtagaccctcctctgatctaattgggttcgttccaagtgtgtatctcactccggggagccccgattgctgaaccacatcccgttcaccctggcgagtccctcgtggtacgacgtcccctgggcgcccggatctccgtatctcacaggagatatctcggtcctgccagcggactcgccaaggtggacgacgaccatccggggtccttggcaaatccacatgccacctcgtccgacccttccagaggtggggtggaaagtgcatgtgtctgccaagccatcggaattggaatcggttgcctcagtcgtagcactgtggtgcgtacgccacagcgtccccttcaaagtacttcgcacccgaggtctcgttcacgcgagtcaagtcaagtatgcggaccgaagtcagagcggcaaggtctgcacctgctaccccgacggcgagagccttgagcacttctgctccggtcttgccgagctgcttcagaacgtcgattcacctccggtgtccggcgagctgcgagtcggatcctcccctctgtggttgcgtcacgggagtttccgagaggcatgggcggtgtcatccacaggagtaccgttcccggtctacccgggaacaacacatcctgatcgtcgaggccccgcgcccgcagaatccgatcacgacacgccgtggatccggaggctccgtcggacgaatcgccccagcacggttcttcccatcgacgatgtcagactcctccaccaatcaaatgctggcggcgtgtatcaggcaacatggagagacggcacatcggtagtcgtcaaggaggcccggcacctgtccggacttgatgcggcgggtgtcgacgcccgagtgcggctgcgtcacgagtacgaggccctgagaagactggacccctatcgggccgctccccatcccattgatctcattgagaccgaggacggctcgttcctgatcatggaattccttgacggaatgacagtccaccaggagatgtcgaggttccatcctctgattggtaggcgacctcatcggctatcgatgaccgatttttcacgctggtgccgagaggtcgaagatcgcttgaggaatgtcacgagggtcatggccgggtgcggaatcgttcacggggatcttcatcccgcgaatctgatacatgtcggccatgaggttttggttactgactttgaatcctgctcaatcgacggggtcgccgtctcgtcagggatcgccgctccctggttccagtcggacgacacgattcccgatccggcgacgactgacgatctccacactcttctcgtggatccgacttgcggccccgcgcttgtcctccatccaaatcttcgcgcgctcatcagccaggccgcagtcgaggacatgatgggaaatccgactggtttaccacatgcctggaacctcgaggacgtgacaagcgaactcgccaaggggatccgggcatcagccactcccgcacgagccgaccgcctctttccctcagacccctacctgttcgggcatccaggttcagaattcggcctgatgcatggcgccgccggaatcatggctgctcttgccgtgactgggtacggtgttgacgcgaatcacgtgacctggatgaaggaccgcttggccacccgcccgaccctgctgccggggttggccaacggaatcgagggaattgccctgggtctctccctgtgcggtcagaacgacatggctgcatccctgctccaccagtccggaattctcacgatcacaacgaacggatcgactgacctcaccctcggtactggtatggcgggccgagcgtgcgcgctgcagtccctctcacaacgactgtcatcgaaatctctcgcccacgctgcatataccctctgggaacaactcgccgtggctgtgcggaacactgatgtggccttgccgaacggcctgttctccggttgggaggggatcgggctctccctgcttgcctctcccctgccggatcgtcatgatctcgcccgccactcactccgactggccctggccacgacaacgattgttgacggtgcgctcttctcaggcgagggacagatccgatggccatatctggggcgtggtcccgcggcatgtggcccgctcgccgccaggcttgatgatgaccagacggccaaggccgtggcacagacctgtcgttgtcccctgactgagtcatccggtctccacaatggccgcgcaggtctcctactcgtcctccgccagctcgtgggagaccaagacgacgccgttcgccgccacctcatgagactgtcgtggtcgatggaccgtcgcgaggaaggcacattgctgctgggtgatcatggcctgcgtttctcatccgatctcgcgacggggtcagccggcgccctcctcgccctgagcagggacccatggcggaacatgacacgaatgctcggaatatgcgatgacacctgtcatggcccactagtgacagtttgatctagcgccgatagttcacaactgaaagactccaaacatcgaggaaaacatgctgagccaaaacgccttggcaggcgtggctcgtttcaccacgatgaacaccaggagacagaatgtccgttgaggccatgcaatccatcgagatggacgaggaaaacagcgccagccagacagtttgcgcttgttacagcttcttctcgtggtcaggatgctgcgtagtctcccaagcggtggaagcatcttgatcgtgtgagacgccgtcgactaccctgtcccccgtggtacgcacacgccccgtcctggacagtcccggaagaccgctcatcgcctccggagtcgtcctggcggtcctgctcatcatcgcggtgatgacgatggtgcttcagcgcgaccccactctcacccccggacgccgcattctcggtatcgtcctgtccacggtccaggccgtcggattcatgtggctgcagacccgcatggttcgtcacggcaagggttcgcgcaacatgcgtgcgacccttggaagggtcggtttctgggccacgtggggactcgtcgcagtgggagtcgtcaatctgtggctgaccaactcgtggaccctcttcggggcctccgtcgccacgcccctccttctcctgccaggggtgtggagtgtggtggccaccctcgtgaccctgatcgtcggtttctccgacctcgtggtcacccacacctcgccactgacctcagccacggtcgtgctggtgaccatcgcggtgtcggtgaacctctacgcattcacgaagctgtcgacggcactcgttgaactccgctcctcccaggaggagatcgcccggctgcgcgtggacgccgagcgtcaccggatatcgcgggacctccacgacatcatcggtcgcaccctggtcgccacgtcgatgcgccagcaggcggccctccacctcgtcgaccgcgacccgcaacgggccaaggaacagctcgacgccgcccatgacgcaatcaccgaggggcagcaccagttgcgttccatcatccaggccgagatgagcaccagcctccccgacgagatcagcgacgccacattcctgtgcgaccgactccacatcgacttccgcatggatgaccgcggcagaccgcacaaacccttcgactcggcggcggcggcggccctgcgcgagggaatcacgaacatgctcaagcacagcgcggcgggctactgccacgtcgccatctccccggacctcctgaccgtcaccaacgacggttgtccgcaatcacctcgcccctccaccacaccgggcaccggaatcgaccatctccggtcccagatcgaggcgctcggtgggtcggtgacgacgtcgcggccctcgcggggcaccttccggctccgctgctccttcccgacccggggggcgtccacgaccacacccgcgaccgaaggaggacgatgacgacgagaatcctcctcgccgaggacatcaaactggtggcagaggccttcgaggcactgctctcggtggaaccggagttcgaggtcgtcgcacgggtggcacgcggcgacgacctggtcacatccgccacccgcctgttccccgacgtgatcctggccgacatcgacatgcccgggatgaccggcatcgaggccacccgaatgcttcgcgacaagggataccgcggcagaatcatcctgctcaccgccctgccgggaagcgggcacctgcacgccgcgatggctgccggagccgacgggtacctgctcaagtcgatcaccgcgccctccctcatcaacgccatccgggcggtgtgcaacggccagtcggccatcgacccgaacgtcgccgcggtcgccatgcgcaagggaccctcgcccctcaacgaccgggaaaccgagattctgcgcctagtcgccgacggttcctccaccgcgcagatcgcctcgcggctgtacctcagcaagggcaccgtcaggaactacctgtcgacggcgatgtcgaagctcgacgccgactcacgcacagcggcggtcacgcgggcacgcgaggagggctggctgtagcaggcgacccgctcagcccaccgcccctcagcccaccgcccctcagcccgccgactcctgacgcacggcctcctcgaccgcccggctgagcagggacccggccctgaccatcgacgtctccgggtccggctcgaggtcggacaacgcgatgatccggtcgaacgcggaccgtttctcctcgggcaggtcacagcgtccgcacaccgcccagacgggcaccccggcgtcccgggcgatcttgcggatggtgtcgagaagcttgccgagcagggtctgctggtccagccgcccctcccccgtgacgacgagactggaggcggagatccgcgacaccgcgcgggaccatcccaggacgaccgccgcgcccgggcggtacctggtccccaggcacatcagcgcccagccgacccggctgggcggctgcgaaccccctggccaccgcccggcaggcctttcccgaactcagcgaccccttgaaggagtcgacggcaacgatgaccggcgcattcggatcaggacgcatgggatcagcatgtcacgtcgatacggagcagtcgcgccgcctacccctagactcgggggcatggtcaaccgagtctacctgtccctgagcgttctcgccctcgtgctgtgggtggtcgcctaccgtcacatgccgggctgggccgcgggcatcaccctggtgggcatcgtcgtgctgtcgctgtggtgcgagtggtcgcgggtgcgcaccctggccaggatcggcaagtcccgccagcagggcccccgctcctcccgaggacgcaacctgtcgtgagcaatacgattcccgcagccctccaccccggccctgacgaggcc

SEQ ID NO: 433 - DNA, 26636 bp, Propionibacterium acnes
ccttgtggacaccacgtcatccacatgacttgtgtcacatgattcccggaccatcatcaagcagatgctcacccaactgtaatgatttctgttctgaatctggacatgctctgacctgcattcaatgatcaattccgtgcgatattccacaacgcacggagaggtcgcagacaatgacaacagaaagcatccccacgcggctgctcgtgtggcacgagcagaccgatccgaccaagctcctcaggatcaccgacgcgatcaggaggggggatccccttccccccatcgaggccatggcgatcggccacaaattcctcgtcctcgacggtgcgcaccgggcccaagcccaccagtactgccatcgatctgagatccgagcccgcctccacaacctccccctcagcgcggaagtaccaggctggagccactccataccccgcgatgcagcagcgaaactggctcacctactcctccccgtggacgctctcggtcaggcggaacatcgtcctgcacggggtgcgccgtcaggtggggaccgcttcacaacgaccgcgcgacatctttctcgcctgccaccggatcgcgcgagttgcctacgcgcatggaatcagacctctcggcccggagttctccaacgctccgacgatcgacgccgccaccatgacctggcccccgccgaacgtgggcacgttgtgggccatcgccagcagtctcggacccctgcccgcaactgtgacccggttcgccccgatcctccggcacgacgccatcggggattccgcgatgacacccgtcacctccgccgcgtgacgacccgcgccaattccgccccaccactggatgaggggcagccgcgtggacgatgctcctgttcaggcagggactccatacgagaccaataggaaaatcatgatcaaaaacacaagccctctgaccgtgaaaaatgtctcgaaaacattccgtggctccagcggagaagccatcaaggccgtgcaagacgtgtcattcaccgttgagcgtggtgaggttgtggcattcctcggcccgaacggcgccgggaagtccaccaccatcgacatggctctcggcctcacccgccccgacagcggccagatcgaggtcttcggtactgacccgctcagcgcggcccggtcgggacgctgcaccgcgatgacacagaccggcgggttgctgcccgacctcacgattgggcagaccatggagatcatctcctcgctctatcgtggctcccacatgaatgcctgcatggagcgagcaaggatcacgcatctggccgatcggcaggtgtcgatgtgctcgggaggcgagcgccaacgacttcgcttcgcactggctctgctgcccgatcctgacttcctcatcctcgacgagcccactgcggggatggatgtggaggcgcgccgggacttctgggcagagatccacgaggacacgcgtcgtggtcggacaattctgttcgcaacgcactacctcgacgaggtggacgagttcgccgatcgggtcatcctcatcaaggagggccgcgtcatcgccgacgacacctccgacgcgatccgcaccatgtcggggggttgcaccgttacggcgaccattcccgacttctccctggcacgactgaatctgccgggcacccaactcatcaagcagggcggcgcacgcgttgatctgcaccatcccgattccgatgccctcgcagcgcgagtcatccagctcggcggcaccgacctgcgcgtggtcccccgcagcctcgacgacgccttcctcgctctcacctcaaccaccaaggagtcctgacatgaccgcccaagcgcttcccgcagtcgccactcccaaggcccgccaccgatccgccatctcgctgaagtacttgtggtgcgagatgcgtcgccccttccggcgttcgacgatgctgttcaacctcgccctccccgcagttctgtacctggccctgttccgcaccgtccacaccgccgagctgccggacgggaacttcgcgatgtggatgatgatcggcatcgctgtctacggagcggccactgcgagcaccagctacgcagcctccatctccgtcgacgaggccaacgggtggacccgcaccatccgcctgacgccgttgtcgtcggtcgggtacgtgctggtgaaggtcctctgcgccatggccatcgccctggccccgaccctgctcatcggtctcatcgggctgttgaccggagctcacggcacgctgcgggtctgggtaatcggactgggggcggcttggctcagctcagcaatcttctccgccttcggcctggctctcggactgtccctgcgtcccgaggtcgtcatgcacgtccccggcctggtcatcaccggtctggcgttcctgggcaacgtcttcgtccccctcagcgggacgatgctcaccattggccgctggagccccgcctacggcatcaccgcgctggctcgttacccgctcaccaacggcatcgacatcgggggcggccacgactccctgacggctgccctcatcggcaccttctgctggttcgccggattcgtgttctgggcctcccgtcgatttaccaagagcacgggtcgtcagtgacagattcggccgatctccggaaggagcagtgttatgaccaagcccctcattgcagtggtcaccgcgggccaaggagcgcagaagcctcgcctgctcacgccatggctcaaggtccccggcgtcacggagaagcttgctgcatggtccgctcaggccgatgtggacctcgtcgagctcggtaccagggcgaatgcagaaaccttggcagcgaccgagaatgcgcagccactactggtctgtctcggagtcctcgtctcggatctcctgaccgaccagaacattgtgctcgcaggacactccgtgggcgagctgacagcagcgtgtctcgccggggtagttgatcccgggacggccgtcactcttgcacgacggcgtggactggccatggcgcgggcctgcgctctccacccgaccaccatggcggccatcattggtgacaatccggatgacgtcctccggcggctctcggaactgggactcacggctgccaacatcaacggaggcggacagattgttgcggccggctccaccgacgcgatcgcggaactggtggcgacccctcccaacgggaccgcagtcaagccgttgcgagttgctggcgcctttcacaccaagtacatgacacctgcgcaggacgctttcgcccaagctgctcaggacgtcaccttctccgacccgcagcacccgatcatctccaacctcgacgggcaggagatccggtccggcaatgacctgcgtgaacggctgattgcccaggtgaccgcgccagttcgatgggatctctgcatccagcagatcgcggatcgtcagccggaactcgccctatcggcccctccggggaaggtgcaggcgtcgctcttgtctcggcagatcccggacctcgcgacggtctgcatcaccacaccacgggaggcagcccaggctgcacagcggatcgaccagtccgtatccgtccttcagggggcatgatgctcatccccgagtacttcctcacagcctgttcggaccatgctgagcgcctggcgatcatcacccacaatgacgttgtgacgtgggccgaactggcgactcgcgtcgacggttttcggcgctggctgcgggaccatggcgtgcaccgccaggacagggtcgttctccagacgccaagcaccgtaggcacggtagccctcatgtgggcctgcctgctcgacggcgtgacgatggtcccggtgcaccaggacctcactgcctcccaggtgcagcaagtcatcgacgactgccgtccagctctggtgtgtggcagcccggacctcgtccaactcctcaactcccccggaatgaagacaagcacacctccaacgcggccggagtcaacgagtattctgccgtccttgtcccgggtcagccccgatgaccttgcgatgctcatctatacgtccggcacgacgggtctcccgaaggggatcatgtgtccccaccggcaggtcgccaccgccgcacggatcgtccatgactgtctcgggtaccgcacggacgacgtcattctctgtcgcctgccgttgtccttcgactacgggctctatcagattctgatgtctgccatctccggtagcgcggttgtcctgcgggacggaggcgcgcaggaccgcaacctggtgcgcgacatcgcccgtcacggcgtcactgtcgttccagtcgtgccgtccatggcgtcaatgctcatcaccctgcagcgtcgtgatcagttgccgaccatcgtcagactgttcacgaataccggggcgcgtctggcacccgagaccgcgaaccagttgctcgcaagcttccccggctcccgctatgcgtcgatgtatggcatgacggagtgcaagcgcatctccatccttccggtggaggagtacgagacgcatccggacagcgtgggaagagctctgcccagcactcacgtcgagatcgttgacgctcagggagttccggttccggcgggcgagcacggggagatcacggtgtccggcccgaccgtgatgaacggctactggcaggtgccgaacagtcccagtggacgattccgacccagcggccacggcctcactctgttcaccggtgatcgcggctggatggatgaggagggacgtctctacctcctcgggcgcgacgacgagatcgtcaagcatcacggcatccgaatcagcctgcaggagatcgagatagccgccgaagccgcgccgggcgtcgacgcagtcatcgctctcaagccggcctccgactcggcccccattgaaatcgcctactgcggcagcacgagtcccgagaacctggcccgccatctcgaaaccgtcctggaccgggcgcgacgaccccaattcatccaccaactccagcagatccccctgacccgtaacgggaaaccaaaccggtcagcagccgccgaggccatccgctcaagggcgtgacggcgaaggccaacacccacagacgaaaggaaaccaccatgacccaggccgagttcaaccagttcatcgagtccacctgctccgcgacgatcgtggatcccgaccgtcctttggtcgatcagggcatcgactccctcggaatgctcaccctcatggtcgctatcgaggacagcctcggcatcgaactggatcccgagtccctcgccgacggtaggggttccacgccctccggtcttctgtcccttgtcgagcagctgaaagcgacggtgtgacgacatgacgacgatggttccttgccgccgtgtggagatgccgcaactgttcgaccacatccccggaagcatctctctctcaggagggctgcccgatctgagcgtgctcccgagcaatcagatcgccgaactgacgtcccggatcatgcgtctcggctcaagaatcctcctgcaatactccaccccttcggtctcgtcctccttggtgccggccatcctggacctggcggaacgaacatgcatgtcaccggatccgcggaatctgatcccgaccgcgggttcccaactgggcctggccatggtgatcaatgcctttgacggcgatgagatcatctgtgactgcgccacctatcccggggcgctggccgccttcgcctctgccggcgtggaaacaacgggggtggccagtgacgaggaggggctcaacccagacgcgctcgctcacgccgtcgcagagggtcgggccaatggccgccgcatcgcagccgtctacaccacgcccaccttccagaatcccaccggctccgtacagtccgagaaccgccgtgcggccctgctcaaggtgtgtgctgacaatgacctcctcctcatcgaggacgatccgtacggcatgctgtccttcgacgggcagacgtggccagctctgaagtccatggacccacagcgcgtcatctacctgggcaccttctcgaaggtgttcgcaccgggcgtccgttccggctggatcgatccgcccgccaatcttgtcgagaaactccgcgctgtgtgcgagatcatgacactctcgccatcagccctcaaccaagcgatcatcggcgagtaccaccgtcgtcacggatgggacgaactgttggagggctatcgcgcctcctaccgcgaccgagcccgtctcctcatcggggctctcgaggctgaactggcaagaacgaattgcactggcacgtggacctggcgtgaaccacggggcggcttctacctgtggttggagaacgtcgccagcaccagcggtatcgacgttgcgcgtcgcgccgccgacaacggagtggccgtggtgcccgggaaacacttcgacgcagccggacacgattcgccgagcctgcgggtgtcgttcagcaattcacgcccggctgatctggtcgaaggagctcgtcgtctcgcccgtgcactggtgggagaggacgttcagaaatgactctcgcgacacgcaccgccaccgacaccctgcagcagaccttgccctggggcacccacgaacgtctcgtcttcgggcgggcgctcctgcgcagcaccggcttcccagccgaaggcttggccctgctcgactccgacgacatcctccccctcctcgactcctttcttgccggggacatcgacagaactcacttcgagaaggaatacaccagtcgcgaggagtccggcgcaagggcgctcatcaacgtcttgaaggacgatgcagtatcgcgcgccatcgcatggcagaaccccaccgcgtggaggtccttcgaatccctgtcgtccacgagcggaatcaatgcttcgactcggcgcaaggtacgccaactcgccctctactggcaacgttactgttccaaggctgagaccattggatacttcggcccgttcgcctgggccgaagtcgacccggaggcctctgcggtcgaattcatctcctccgaccatctgatcgaccgttcccacgtcgcaatggaggcgtgggcggtcattgagatcgggaaagccctggcatcacgggccgaccttcagtggtggatgccaccaatcctgtcccccgccgtcgacctcaacatggagagaggcaccgtgacggtggctggacaccagccacgacgggtccgggaggacgaggcacgagttctcttcctgaccgacggcacccgtcccgccgcccagatcgccaagagcctcgacatggagcccgagcggttgcgcaggatcctcgtggcccatgaacgtcgtcacaccgtgatctgggacgccaacatccctgtctcagtgcacgcgtgggacatcctgcacgaacgcattgcccagatcggagacgctgggctgcgagatgaggccactgctgttctcacgaggttcgacgagcttctggaggtcatccgcaacattcccgacgcccggtccctgacggaggcgacggaatccctgtcccgtcttttcgaaaccgtgacaggaacctcttcgaacagacgtgcgggccaggcatatgcagcccgcagcctgtgctacctggactgcacccgcgccggaaccgccaaggttgggacccggcttctcgaagccctcgacgcccccctcaacctcgtcctacaatccgctgactggttcgcggcgaccttggcaaaggaatacaccaccgaaatcacggacctcgcaaatcgaaagcagcgggcctcccaccagccactgaccatggctgatgtctggccgtccacgatgtcgctgttctggggggactcaccgtccccactgcagcgagccgtgaccgaactgtcacggcggtggagcagagtcctcgaggggctgcagccagtcgacggtcgcatcgacacgacatcgtccgctctctcgggcgccgtggacgagcagttccccgtgtgcaccccgattccagaactgtcagtgcacagcccggacctccaggtcatcacctcgagcactagcaacatcgcctccggacgagtcactgcagtcatgggtgagctacatgcctgtctgagcagtctcgacatgccgttgctcgagtggtcgctgccccatggttccattcgcgatcgcatcaacaccgcgctcaacctgcgacgtctggttcccttgttccccgagacatggaggcgcaacaccggccgcatggttccagcgacggtcggagtgggggatcgcgcaatcgggttcactcggacggccgatcaagaccgtgcgaacacatggtcgatgtcggcactgctgttcgagcagaccgaggacggactcatgatccgtgatcccgatggcaggctctggaccatcgcacaagcgtggagcgtgcccatctccatggtcgccgccgatgcgttcaagatcgggctgcccggctcaccagcccctcggctcaccattgacaatctcgtcgtgttccgtcgtacctggaggtttcccgctggctccatcgacatcatgcacggttcagccgccgagaaacacgctcggctgagggagtggcaggtcacgaatcaccttcctgaccacctcttcgtcaagttcccctccgaacccaagccgatctacttctccttcgagtcccccgccatggccacggtcttcacgcgatcactgcagcgcgacgcccgagagaatccagacagtctcgtgacgatgtccgaagcactgcccgagcctcaatcctcatggctgcacgacacccggagccaccactacgtccacgaattccggctgcaactgaccaaggagcgacatgacgaccacagttgagacacatcccgaaacacgtggcacaaccgcgacatccatctccaatctgatcggtcacacccctctcgtaagaatggaccatctgttcgacggcctccccttcgaggtgtacggcaagctcgagaagctcaatcctggcggaagcatcaaggatcgagcagcacaatccatgatcgaacgggcaattcgacggggtgagatcgtcccgggccgtacgaccgtcatcgagtccagttcgggaaatctcggcatcgccgtggcgatgctgtgccaggagcacggcctgaatttcatctgcgtaaccgatgccaaggccacgccaacgaacattcgactcatcgaagcgttcggggccactgttgaggtgatcgaagaacctcatcccgagagtggcgaattcctccccatgaggctcaagagggtaagagaactgctgtcagagattccagatgcatggtggccgaatcagtacgggaaccccgacaatccggcggctcacgagcggactgtccgcgagatcatcgaggcaatcccgcgggttgacacgattgtctgcgcgaccggctcgtgcggaacccttcgcggctgccacgaagcattgcgaaagctgtccccacgcacccgactcgtcgccgtggacgccaagggcagcgccatcttcgacgaggcaggagcaccccatccccgctgtgtcccgggacacggtgcgtcagtgcgaccgccgctgtggcgcgcggggctcgccgaccaactggttctggtctccgacgcggactgcgtcgtgggatgccaggaggccctgcgcaccgaggctcttctcctcggcggatcctcgggagcaattctgacggccattcaccgagtgtctcccacgattcccgctggttccaccgtggtgacgatcctccccgacggcggcgagcgctacatcgacaccatctacagccgctcgtgggtcgactcacacatccccgggctgccctctctcgccgactggggggctcccaaccccgccaattcgtatgacctgaacagaagtgcctcatgaagctctacaccagagagaccgtcgaaactgcgcttgtcgggcgtcatggccaggttctcagtgccgtacagagtgcatacatgctgcattcgacgggagagacatcgctgccattctcaaccttcctccgcccggccgggtatccgaacgatcggatcatcgcacttcccgcccacatcggaggcgacttcgacatagccggtatcaagtggatctcatccttcccggaaaacctcgaccggggccagcaacgagcttcctccgtactcatcctcaatagtctggagacgggatacccgaccgccctgctggagtccagtcagatttcagcaacgcgaacggcagcatcagccgccctggccagcgccaccctccatggctccgaagaccatgtcagcacgattggcatcatcggctgcgggacaatcaatcttgcaacgatcgactacctcttccacgtgcacccccagatcaacgaggtcctctccttcgatctgaggcgggagcgggcccatgagttctcgcacctcgtcaaggcttcgcacccagaggcccgggtccgtgtcgccaaggagcccgacgagattctggccgcaagcaacaccatcgcgatcgccacgaccgactcgagtcattggttggaccttccgccgtggcacgggccggggcaccaagtcgtcctgcacacgtcgctgcgagacctgtcagtgccctcgatcctggcagcggccaacgtcgttgacgatcctgatcacgtctgccgtgaagcgacgtccttggatctggcaactcagcagaccggcaaccgggacttcatcacggggagaatcggagacctccttcttggcgcgccgctgtcctcaagtcctgactcccgtgtcattttctcacccttcgggctcggcatcctcgacctcgcagtcgcctccgtcgtcattgctgccgcctcctcttcagcagtcgagatcaatgggttcgaccccgggaaacacgccacaagcatgattgaggtgaatcgatgaccaccacacagatcaacgacaacacggccgttctgcgcgacgtattccccgccggctccgtcgcattcgtgagcggtgcctcacgcggaattggcgctgcctgcgcgacagcccttgcggccgcgggatgcaacctcgccatcacttatcgaaggaaggagaacgaggcggcacaaatcgccgaatccattgaagccatcgggcgccagtgcatcacaatgcagatggacgtaaccgatgagaaccaagtgaccagagccttccgcatcattcgccagcattacggacgcctggacgccgcggtcttgaactcgggaatcaccagtgacgggcatcttgcaacaatgagccgctccaagtggagctcggtgatcgacacgaatctgaccggaaccttcctctgcacgcgcgaggcgaccaaggccatgtactcgtccggtggctcgatcgtcatggtcgcgtccaccagtggagttgcagggcgaccgggccaggccaactacgcagccagcaagggcggaatcgttgccatgatgaagacgctggccccggaggttgcggcaaagaacgtccgggtgaatgcggtggcacccggcttcattcagaccgacatggtggcggccgttccaaaagcggcactcgcccaggcaatccaacacatccccatgggccgtcttggcctggcacaggaggttgcgtcagccgttaccttcctggcctccccgctcgccgcctacatcacagggaagaccctcactatcgatggcggaatgatcaacggctgaccccaggacccggacacccccagtaccgagaaaggaacaacaatgaccgagatcacccacactgccaacagcatccgaacccgcgccgaggaacgttccaacaaagcttggcgcctgaaggaggagatcatctccaagctcggtctcgagaccaagccagaatatgtctcggacaaccaaccgctcttcggacgtggccttgagatggattcccttgacactctcgaagtcgtcgtcgccgtcaacaatgagttcggagtctcggtcaacgacgacgacgtacaggcgttcggctcgatcaatgccatggtcgatttcatcgaggtgaacgagaagtgagttctcttgcgctcgaggcgccacccaaggacgcccgtaagaaattcgcctacgacagcgatgccatcaagacgatgctcccacatcgttggccgatgctcatgattgatcgcgcctacgacgtcgtcccagggaaatcgggcaaaggcatcaagtcggtcagcgtcaatgagccgttcttcgccggtcactaccctgaccattccatcatgcccggcgtcatgatcgtcgagtcgatggctcaactcgtggccgtcatctacgtagccgaggccattcagaacaatcccggcatgacgtcgcacgacgcacgttcaagcgttggttatctcggcgcgatccatcagatgaagttccgacgcctcgtcactccgggcgaccaactcaccctccacgcccagctcggcgagaaagtgggggctctgcgcgaggtttccgtgagagcactcaatggccgggatgtcgtcgcccagggggaactcgtcgtcaccgagcggtgacacccagccacacacgagaaggaagtcccatgatcgttcgcccctacaggccacgtgatgcggaagcgatcgtacatctctacaacagccattccgactcccccaatccagtgtcgggagggattgttgaggaggagttccagagggagctcgaagaacgtggttcgacagtgttcctagtggccgaggaggccggatccattgtcggcacattcgggatgttccgcacgaatggccgacacaccatggccgatgatgaagtcttcgccgacatgttctatgtcaccccgtcacatcgactctcgacagttccgggacagctaatcactgaagccatcagcgagtgcttcatccagggcatcaacgtgatccgcctcaccgtgaaccccgcgaacatctccgcgctcaaggtttacagaaaagtcggttgtgcctgtctcggggccaccgatgcaggcgaggacgggaacattgagctgtacaacttcatccctctggttcttagggcaaccatcaccaaactcgaccacgattgtattcgagccctggcggacatgacttcgttcgcctgcatcaccgagggacgtccacttgatctgtcccacgacttcatcgtggacgctggacggaagatcgtctcccacagcatccagatcgggcgttcaaccatccacgccatggtcgacacgggctcgaggaccattgtggaggccaccctcgacaaccgcgactgggatgctcctcgccagatcgtcgcccccaccccctgtcagaaccggcccgaggaacagcgaggcaaccctgtccggctggtgcacaagaagcttgaggtcaccttcaacgaaggagtcattgagatcagtacgactggccactggggcccggtcctcgcaatgtcctggccctcctccgtctcgcaccgcgctcacgggtggcgacagggccccgccaagtcgtatcgatgcgagcttctcgagaattgcctcgtcctggatgacgaaggaggagtgaaatgcaccatcagcctcaatgattgccaagtcgcgatccggatggatggtgccccaaaaacggaattgagaatgtaccagtggtgcagcctgcgccagggctatctgacggctgacaccggcatcacgagcttcaaccgggcatccagtgggctcggagtcgccgtccgggactcgtccgagattgtcgccgcgggccttcccgtcatccctgacacaccgatcacatggagtgagggtgacatcacggttcagctcgatccctgcggccgcgcctccctgatccactcgaccctggtggaccgaagaatccacttggacgagtctggctcggcaagtctcaccatgaccgtgtttggtgactcccagccccatcgtgccgacaccgtcgagctgcctcccctcgcggcaggcaccgacaggatcgtcctcaagccggctgccggaggcgtgaccacatggcgcttgggcgccaccaaggtgctcaagtcaccgtggccacacgcccgcgcgctcgggcccaatccgatctggcgagccggcctgtgggtcagtcacgagccggatcgccacgaccgtcgccaaggaatggggtggggtcccgatcatcgcagttggaccctgtcggaagacaccatgaccagtactgacgggacactctcctggcgcttcagcggctcccccgacaccggctggacggtcgacgtcacgacgagcaacacgcacggggagaccgtcgtctggctcaccccggactgcccggcgggcgagaggatccgcacgtctgatcatgccgtgacgaccatgcttgacatctcgaagccatggcagcgctggaccacccgatgcgcaattcctctcagacacgggaagtggttcctcatcgagcctgatcatgacctcactgattcccccgaaatcctcatgcgctctgttcacggggtcctgctcgtcggctgtgtcggacgagcccactccggatccgcttcctggcgctttgccatcacgtcagaactccccacctccaacccaagaagaaacgactacacctcagccgcctgaacccaaccagttggaacacccactacagaagaaatggagcaccaccatgtccatcactgagcagtacaagacccttcgcacctcggtcggcctccacacgcctaccggtcccctggtccgtatcaccggtgatgatcgtctcgagtttctcgacaccttcctgtcccgcgcctcggacttcgtggaccccgacaccactcgggagtgcctcgctctcaccgaggacggccttccgctgacgatcttcctccacatcgagcgcgaggaggagtcatggctccttccccgcaccgccatcgatgcggcgaccctcgccacgtacctcggcaacctcgagaccgatggtgacctgtcaatcgagattgctccagagggttggggagctgtcgctgtcgaggggccgctgtcgtggcagatcgccgaaaaccttctcgacttcgacgtggctggcctcgttcttcacgccgtcacggacgtcgtcgttcccggggcccccgagggatcgaaggcatggctcgcccgggtcggaaccactggggagtacggctacctgctcgtctccaacgttcccgacctcgcccgcacttatctcctcagccgcgccacggagctgggcggtcaggcagtcgacgccgatgctctcgcacgagtccaggccgaggccgggatgccctattacgcgatgggcgtgtgccacctcgatgtcgccgggggtgacctcgcctggctcgtggactggcagcgcatcggcgagttccaaggatccgagaatctgcccacacccgtccgagaccagcgccgactggccgccatcgccctgcccaccggcaaccgcccggaagctggtcagaccgtcgctgccggggatgaggagattggagtggtggtgtacgtcaccccgtccgccaatcccgatgaggaactcgcgttcgcacttctggatgctcctttctggactcccacccttccgttgaccgtcggtgcccacgacgggaccacggtcaccctgccccgcgtcgtggcagcctccagcctcaacaagctggggtgacagcgatgacgatcactgctgagaacgccaccacccgcagcgacattgcccggagcattgcggtgaccggcgtgggactggtcacggcacagggtgaccataccgacgagtgctggaccgaacttgtcgatggggtttgcggaatcaccatgaacgtcacgttcgatgactctggcaccacgattccgtgtgctggcgtggctcccattccgaactctgattcgatcgaccgctgttacctgctcggcgtccatgccatgcgtgaagctctcgagatgagtggcatcgacctggactccgtgggtcgtgatcgcatcggactcgtggtgggctcaagcctcggcgcgatgcccaccttggaggcggctcatcgccgggccattgagaccggcgtgctcgatgccggattggcggcagactcccagctcccctgcgtcgccgaccacctcgccgctgagttcgacatccgtggaccccgcgtcgtgacatcgaatgcgtgtgccgctggtgccgtggcgatcggctacgccgcagaactcctctggtccgacgatgtggacctggtcgtctgtggcggtgtcgatccactggcccagatctctgccaatgggttcacgtgcctgggagctctcgacaatctcccatgcagcccgatggccggttcctccggtctgactctgggcgagggagccgggttcatggtcctcgagagaacagatgcggcggctgccagaggccaggaggtgatggccgaaatcgccggctacggcacaagttgtgatggttaccaccagactgccccggacccgggtggcaatggcgcccgcagctcaatggaggccgccctgcgctcagctcatctcaagccgtccgacgtcagctacgtcaatctccacggcaccggtactccgaccaacgacgccgtcgagccgaaggcactccggtcattgttcaagtccgatgaccttccccctgtcagttcggtgaagggcgccatcggtcacactctcggcgctgctggcgccatcgaggccgtgtgctcgatcaaggccatccacgagggggtcctgccgccaaccgtcaacaaccgcgggcaggcttcccgaactggtctcgacatcgtgccggagtgcgcacgcaaggccgctcccgacgtggtcatctccaactccttcgccttcgggggcaacaacgcatcagtggtcatcaccgcacctcgaggaggcgttcactgtaccgccccggcgcagcttcgcgaggtcggaatctcaggaatggcagctctggcgggaaaggccgccaactcggaggagcttctttcggccctgtcagaagattgtccaatctggatggccgatgagaagacctgggaaggggatgctgtccaaaccggccatgtggacatcaagcgcctgtcccgcacaatcaacccgtccaaggttcgtcggatggaccccttgggaatcatctccagcgcggtggtgactgatctgtatgcccgacacgggaagctgagccgcaaggatgccgaaagcacgggaatcatcttcgcaaccggctacggtcctgtgacggcggtgacgcagttcaatgacgggatcatccgccacggttccgagggtgccaacgccctggtgttcccgaacaccgtggtcaacgcagccgcaggccacctcgcgatgctgaatcgctaccgtggttacacggccaccttggcatgcggtggaaccagttcactcatggcgctgcttctcgctgctcgcgtcgttggccgcggcgctgcggatcgcatcatggtcgttatcgctgacgagtttcccagcattgccgtccaggccgtcgcaaagcttcctggctaccgacacagggttgatggttccggagccgtgctctcggaaggcgcggtatgcgtcctggtggaggccgtcgaagtcgccgaagcacgcggtaccgcccccatggcgctgctacgcggcttcggatcccgtggagagtccgtgggagtcggtcacaccgcatccgatggacgggcttgggccaaggccatggccgctgcactgggccaggccggcctgactgcctccgacgtgtcgaccgtcgtggcggcatcaagcggacatcctcgcgtcgaccgagccgagcaggcggccaggcggatcgtcggactgtccgcaaccgctacgaccttcccaaaggcgattgtcggagaaacacacggatcggctgccgggatcgggctgttcggtgccctgtgcggttcgaggtcagccgcgcaccagaacatccttgtcaacgccttttcccacggcggtggttatgcctcgatggtggtggagtcactgtgaccacgacgcttctgccacgggttgcccagccgggaccgggcgtcagccatgtcgacaccgaccgtcccatcgagtgcatcatcacccaccacccccacatgccgcgtgatcgcggaggccacgccacctccgtgtcaggcaggtacttgctgcgccaagccgcagaactcatgctcggcacggatcctgcgcattgccccgtcgtcgacccttcgcggcgctggtactggcccggaatcaatcttcacggttctgtctcccatgtcccgggctggagcctgacgacgctgagcaccggcggccacatcggggcagacatccaggacttccgggagcgtcccggcgcaatggcattcatcggtgacctggtcaagctgtcgcgatcggcgtcactccgagaattcgcggagtgcgaggccgtcgtcaaggtgtccgaattgactaaggagacgttcgggcacgtgcgactgcccgaatggacacccggatggcgccacgttttcgaggactactgggtctggagtctcgagatgcacgggatgggagtcatcgcactcgcatccgatctcccccgagccattcgctggtggcggtgcgacgccgatgcccgtggccgtctccaggctctccgacccataagcagtcttggaccaggaaggccgtcatgagccggtactcacgtcgaatctcaggcatcgaacgcggctatctcaacgccgcaacccggggcccgcaccccaccatccacacgatgatcgacttcgagggccgcgtccccgccgactgttggcggcacgcatccacgattgcgtcggccgccaaccctggcatgacagtggtccggaggtcgggccgatggacatccgatccagcgggctgtccggttgtgttccacgactggaccgcggaccccaacgacgttgccgacttccacgctgacatggatctcgtgacgggaccatcgtccacgctccacgttttcgagggggcggaacgcacccgaatcaccttggcagcaagccatgccgtgaccgatgggcggggcatcgaacgatttctcgtcgacctgcttgcagcgttggacgagcgtgaacccattggaagccccgacaccctgaccgatgtcgatatcaaacgatccttggagaacagcatcaagccccgacgccacctggccgctgtgcccgccgatgtcctttctccactgggggggaggaagaaccaacgtatatgggcctccaggacgtggcacagtgccccgggagccatgagcggaagaatcgctgccgctgtggccgagatgatcgaccacgccgcaatgatcatcatcccggttgacatccggcggcacgtcccagaggtccgatccacagcaaacctaagtgcccaactgccagtgatcatcaccccgaaccagcgctggcaaagcatccatgggcatctgctcacggaccttgctcgccatcgagaccttgcgatcatcagtgaggatttccgccacaacaatccgttcgcatcgaccttggaggaaagccaggccatcggcctcgatggtgtctatccctgtgccgcaatcatctccgaccacgggaagctcgacctttcaaggttccagaccttggaactcaccccggtctcgatgcgaagcctcccgatgctcgttccctactccgcaatgttcatcagcagttgcaccgtcggcgagaccaccactgtcaccatcgctcatcgcgctgatgacgatcccgattccataaacaccttcttccaccacatcgaatcccagatgtccatctgagccacgtcgtccctggagagcaaacatgaccacccaagatgtcatcaccccgccgcgccccgtcacctcccatgccacggcgaccaggtccgaggctccaccgcgaagcgtcatcagagccatggccatctcgatggtcgcgaccctcatggtcatgctcgacacgaccgtcgtgaacgtgtccttgagcgcgaccaccgcccgcttcgggagcatgggcagcgtgcagtgggtcctcacaagttacctacttgcactgtgcgcgacgatgacggcctccgcctgggtcatcgaccgccttggtccacggctcaccttcatcgcctcaatgaccatgttcctcatcggctcggtgatgtgtgcactgagcgattcagtgtggcaactcgtcactggcaggaccatctccggtgccggagctgggatccttgttccgacagcatccgtcctgcttatccgtggcatcccacgcgaacaacttggcagggtgcaggcactgaatgggagtgtccagttgatcgctcccctgatcggcccgactgtgggcggtctcctcgttgacaggtgcgggggctggccggccatctactgggcgaacgtccccgtagctcttgttcttctgattgaggccgtccgcgtcgatccggacgaaccacacaccgctaagcgccgcctcgatgctctcggcctggtctgtggcagcaccgcgatcgtgctgacagtgcttggtgtctcactcttcggcaggacgtcgcgaaacaccaccttcctgcttacgatcggcgcgcttgcagtcctcgcatgggcgttcttcatcacccacatccgaagggctaccaaccctctgcttgacgtttccctgtatcagaaccctgtctattcatggtccagcttcaacgtagcggtgcttggtttcggtctctacgcccccatggtcgtcatgcccctctatctcgaggcgacgcgccacctcactgccgtccacactggtctggtgatgtcagtggccggcgtcggcgtcattatggccggaatcctgtgcacgaagatcatgggccggatcggtggaggcctcacgatgacagttggcataactctgagcatcatcgccactctgcccctggcccggctgacgaaccacacctcctacatactcctggcagtctgcttggccttgcgtggagcaggaatcagcctgacaatcgtcccagccatgacacgggccttcgagtccatcaagaggacggccatggcggacgcctctgcacagctcaacctgttgcagcgaatcggcgggacaattgcgacagcagtcatcatcgcagttatccaccacgaggccatgctcacccgcggactctcccccacagtgttctcgcacgccaacgtgtggatcctcaccgcgaccgccgtcacccttctgccggccttcgcgcttgcgaaggccgaaagacaacagcaggatctctgagcaccgaggagtactccctcgtagaccctcctctgatctaattgggttcgttccaagtgtgtatctcactccggggagccccgattgctgaaccacatcccgttcaccctggcgagtccctcgtggtacgacgtcccctgggcgcccggatctccgtatctcacaggagatatctcggtcctgccagcggactcgccaaggtggacgacgaccatccggggtccttggcaaatccacatgccacctcgtccgacccttccagaggtggggtggaaagtgcatgtgtctgccaagccatcggaattggaatcggttgcctcagtcgtagcactgtggtgcgtacgccacagcgtccccttcaaagtacttcgcacccgaggtctcgttcacgcgagtcaagtcaagtatgcggaccgaagtcagagcggcaaggtctgcacctgctaccccgacggcgagagccttgagcacttctgctccggtcttgccgagctgcttcagaacgtcgattcacctccggtgtccggcgagctgcgagtcggatcctcccctctgtggttgcgtcacgggagtttccgagaggcatgggcggtgtcatccacaggagtaccgttcccggtctacccgggaacaacacatcctgatcgtcgaggccccgcgcccgcagaatccgatcacgacacgccgtggatccggaggctccgtcggacgaatcgccccagcacggttcttcccatcgacgatgtcagactcctccaccaatcaaatgctggcggcgtgtatcaggcaacatggagagacggcacatcggtagtcgtcaaggaggcccggcacctgtccggacttgatgcggcgggtgtcgacgcccgagtgcggctgcgtcacgagtacgaggccctgagaagactggacccctatcgggccgctccccatcccattgatctcattgagaccgaggacggctcgttcctgatcatggaattccttgacggaatgacagtccaccaggagatgtcgaggttccatcctctgattggtaggcgacctcatcggctatcgatgaccgatttttcacgctggtgccgagaggtcgaagatcgcttgaggaatgtcacgagggtcatggccgggtgcggaatcgttcacggggatcttcatcccgcgaatctgatacatgtcggccatgaggttttggttactgactttgaatcctgctcaatcgacggggtcgccgtctcgtcagggatcgccgctccctggttccagtcggacgacacgattcccgatccggcgacgactgacgatctccacactcttctcgtggatccgacttgcggccccgcgcttgtcctccatccaaatcttcgcgcgctcatcagccaggccgcagtcgaggacatgatgggaaatccgactggtttaccacatgcctggaacctcgaggacgtgacaagcgaactcgccaaggggatccgggcatcagccactcccgcacgagccgaccgcctctttccctcagacccctacctgttcgggcatccaggttcagaattcggcctgatgcatggcgccgccggaatcatggctgctcttgccgtgactgggtacggtgttgacgcgaatcacgtgacctggatgaaggaccgcttggccacccgcccgaccctgctgccggggttggccaacggaatcgagggaattgccctgggtctctccctgtgcggtcagaacgacatggctgcatccctgctccaccagtccggaattctcacgatcacaacgaacggatcgactgacctcaccctcggtactggtatggcgggccgagcgtgcgcgctgcagtccctctcacaacgactgtcatcgaaatctctcgcccacgctgcatataccctctgggaacaactcgccgtggctgtgcggaacactgatgtggccttgccgaacggcctgttctccggttgggaggggatcgggctctccctgcttgcctctcccctgccggatcgtcatgatctcgcccgccactcactccgactggccctggccacgacaacgattgttgacggtgcgctcttctcaggcgagggacagatccgatggccatatctggggcgtggtcccgcggcatgtggcccgctcgccgccaggcttgatgatgaccagacggccaaggccgtggcacagacctgtcgttgtcccctgactgagtcatccggtctccacaatggccgcgcaggtctcctactcgtcctccgccagctcgtgggagaccaagacgacgccgttcgccgccacctcatgagactgtcgtggtcgatggaccgtcgcgaggaaggcacattgctgctgggtgatcatggcctgcgtttctcatccgatctcgcgacggggtcagccggcgccctcctcgccctgagcagggacccatggcggaacatgacacgaatgctcggaatatgcgatgacacctgtcatggcccactagtgacagtttgatctagcgccgatagttcacaactgaaagactccaaacatcgaggaaaacatgctgagccaaaacgccttggcaggcgtggctcgtttcaccacgatgaacaccaggagacagaatgtccgttgaggccatgcaatccatcgagatggacgaggaaaacagcgccagccagacagtttgcgcttgttacagcttcttctcgtggtcaggatgctgcgtagtctcccaagcggtggaagcatcttgatcgtgtgagacgccgtcgactaccctgtcccccgtggtacgcacacgccccgtcctggacagtcccggaagaccgctcatcgcctccggagtcgtcctggcggtcctgctcatcatcgcggtgatgacgatggtgcttcagcgcgaccccactctcacccccggacgccgcattctcggtatcgtcctgtccacggtccaggccgtcggattcatgtggctgcagacccgcatggttcgtcacggcaagggttcgcgcaacatgcgtgcgacccttggaagggtcggtttctgggccacgtggggactcgtcgcagtgggagtcgtcaatctgtggctgaccaactcgtggaccctcttcggggcctccgtcgccacgcccctccttctcctgccaggggtgtggagtgtggtggccaccctcgtgaccctgatcgtcggtttctccgacctcgtggtcacccacacctcgccactgacctcagccacggtcgtgctggtgaccatcgcggtgtcggtgaacctctacgcattcacgaagctgtcgacggcactcgttgaactccgctcctcccaggaggagatcgcccggctgcgcgtggacgccgagcgtcaccggatatcgcgggacctccacgacatcatcggtcgcaccctggtcgccacgtcgatgcgccagcaggcggccctccacctcgtcgaccgcgacccgcaacgggccaaggaacagctcgacgccgcccatgacgcaatcaccgaggggcagcaccagttgcgttccatcatccaggccgagatgagcaccagcctccccgacgagatcagcgacgccacattcctgtgcgaccgactccacatcgacttccgcatggatgaccgcggcagaccgcacaaacccttcgactcggcggcggcggcggccctgcgcgagggaatcacgaacatgctcaagcacagcgcggcgggctactgccacgtcgccatctccccggacctcctgaccgtcaccaacgacggttgtccgcaatcacctcgcccctccaccacaccgggcaccggaatcgaccatctccggtcccagatcgaggcgctcggtgggtcggtgacgacgtcgcggccctcgcggggcaccttccggctccgctgctccttcccgacccggggggcgtccacgaccacacccgcaaccgaaggaggacgatgacgacgagaatcctcctcgccgaggacatcaaactggtggcagaggccttcgaggcactgctctcggtggaaccggagttcgaggtcgtcgcacgggtggcacgcggcgacgacctggtcacatccgccacccgcctgttccccgacgtgatcctggccgacatcgacatgcccgggatgaccggcatcgaggccacccgaatgcttcgcgacaagggataccgcggcagaatcatcctgctcaccgccctgccgggaagcgggcacctgcacgccgcgatggctgccggagccgacgggtacctgctcaagtcgatcaccgcgccctccctcatcaacgccatccgggcggtgtgcaacggccagtcggccatcgacccgaacgtcgccgcggtcgccatgcgcaagggaccctcgcccctcaacgaccgggaaaccgagattctgcgcctagtcgccgacggttcctccaccgcgcagatcgcctcgcggctgtacctcagcaagggcaccgtcaggaactacctgtcgacggcgatgtcgaagctcgacgccgactcacgcacagcggcggtcacgcgggcacgcgaggagggctggctgtagcaggcgacccgctcagcccaccgcccctcagcccaccgcccctcagcccgccgactcctgacgcacggcctcctcgaccgcccggctgagcagggacccggccctgaccatcgacgtctccgggtccggctcgaggtcggacaacgcgatgatccggtcgaacgcggaccgtttctcctcgggcaggtcacagcgtccgcacaccgcccagacgggcaccccggcgtcccgggcgatcttgcggatggtgtcgagaagcttgccgagcagggtctgctggtccagccgcccctcccccgtgacgacgagactggaggcggagatccgcgacaccgcgcgggaccatcccaggacgaccgccgcgcccgggcggtacctggtccccaggcacatcagcgcccagccgacccggctgggcggctgcgaaccccctggccaccgcccggcaggcctttcccgaactcagcgaccccttgaaggagtcgacggcaacgatgaccggcgcattcggatcaggacgcatgggatcagcatgtcacgtcgatacggagcagtcgcgccgcctacccctagactcgggggcatggtcaaccgagtctacctgtccctgagcgttctcgccctcgtgctgtgggtggtcgcctaccgtcacatgccgggctgggccgcgggcatcaccctggtgggcatcgtcgtgctgtcgctgtggtgcgagtggtcgcgggtgcgcaccctggccaggatcggcaagtcccgccagcagggcccccgctcctcccgaggacgcaacctgtcgtgagcaatacgattcccgcagccctccaccccggccctgacgaggcc

SEQ ID NO: 434 - DNA, 26636 bp, Propionibacterium acnes
ccttgtggacaccacgtcatccacatgacttgtgtcacatgattcccggaccatcatcaagcagatgctcacccaactgtaatgatttctgttctgaatctggacatgctctgacctgcattcaatgatcaattccgtgcgatattccacaacgcgcggagaggtcgcagacaatgacaacagaaagcatccccacgcggctgctcgtgtggcacgagcagaccgatccgaccaagctcctcaggatcaccgacgcgatcaggaggggggatccccttccccccatcgaggccatggcgatcggccacaaattcctcgtcctcgacggtgcgcaccgggcccaagcccaccagtactgccatcgatctgagatccgagcccgcctccacaacctccccctcagcgcggaagtaccaggctggagccactccataccccgcgatgcagcagcgaaactggctcacctactcctccccgtggacgctctcggtcaggcggaacatcgtcctgcacggggtgcgccgtcaggtggggaccgcttcacaacgaccgcgcgacatctttctcgcctgccaccggatcgcgcgagttgcctacgcgcatggaatcagacctctcggcccggagttctccaacgctccgacgatcgacgccgccaccatgacctggcccccgccgaacgtgggcacgttgtgggccatcgccagcagtctcggacccctgcccgcaactgtgacccggttcgccccgatcctccggcacgacgccatcggggattccgcgatgacacccgtcacctccgccgcgtgacgacccgcgccaattccgccccaccactggatgaggggcagccgcgtggacgatgctcctgttcaggcagggactccatacgagaccaataggaaaatcatgatcaaaaacacaagccctctgaccgtgaaaaatgtctcgaaaacattccgtggctccagcggagaagccatcaaggccgtgcaagacgtgtcattcaccgttgagcgtggtgaggttgtggcattcctcggcccgaacggcgccgggaagtccaccaccatcgacatggctctcggcctcacccgccccgacagcggccagatcgaggtcttcggtactgacccgctcagcgcggcccggtcgggacgctgcaccgcgatgacacagaccggcgggttgctgcccgacctcacgattgggcagaccatggagatcatctcctcgctctatcgtggctcccacatgaatgcctgcatggagcgagcaaggatcacgcatctggccgatcggcaggtgtcgatgtgctcgggaggcgagcgccaacgacttcgcttcgcactggctctgctgcccgatcctgacttcctcatcctcgacgagcccactgcggggatggatgtggaggcgcgccgggacttctgggcagagatccacgaggacacgcgtcgtggtcggacaattctgttcgcaacgcactacctcgacgaggtggacgagttcgccgatcgggtcatcctcatcaaggagggccgcgtcatcgccgacgacacctccgacgcgatccgcaccatgtcggggggttgcaccgttacggcgaccattcccgacttctccctggcacgactgaatctgccgggcacccaactcatcaagcagggcggcgcacgcgttgatctgcaccatcccgattccgatgccctcgcagcgcgagtcatccagctcggcggcaccgacctgcgcgtggtcccccgcagcctcgacgacgccttcctcgctctcacctcaaccaccaaggagtcctgacatgaccgcccaagcgcttcccgcagtcgccactcccaaggcccgccaccgatccgccatctcgctgaagtacttgtggtgcgagatgcgtcgccccttccggcgttcgacgatgctgttcaacctcgccctccccgcagttctgtacctggccctgttccgcaccgtccacaccgccgagctgccggacgggaacttcgcgatgtggatgatgatcggcatcgctgtctacggagcggccactgcgagcaccagctacgcagcctccatctccgtcgacgaggccaacgggtggacccgcaccatccgcctgacgccgttgtcgtcggtcgggtacgtgctggtgaaggtcctctgcgccatggccatcgccctggccccgaccctgctcatcggtctcatcgggctgttgaccggagctcacggcacgctgcgggtctgggtaatcggactgggggcggcttggctcagctcagcaatcttctccgccttcggcctggctctcggactgtccctgcgtcccgaggtcgtcatgcacgtccccggcctggtcatcaccggtctggcgttcctgggcaacgtcttcgtccccctcagcgggacgatgctcaccattggccgctggagccccgcctacggcatcaccgcgctggctcgttacccgctcaccaacggcatcgacatcgggggcggccacgactccctgacggctgccctcatcggcaccttctgctggttcgccggattcgtgttctgggcctcccgtcgatttaccaagagcacgggtcgtcagtgacagattcggccgatctccggaaggagcagtgttatgaccaagcccctcattgcagtggtcaccgcgggccaaggagcgcagaagcctcgcctgctcacgccatggctcaaggtccccggcgtcacggagaagcttgctgcatggtccgctcaggccgatgtggacctcgtcgagctcggtaccagggcgaatgcagaaaccttggcagcgaccgagaatgcgcagccactactggtctgtctcggagtcctcgtctcggatctcctgaccgaccagaacattgtgctcgcaggacactccgtgggcgagctgacagcagcgtgtctcgccggggtagttgatcccgggacggccgtcactcttgcacgacggcgtggactggccatggcgcgggcctgcgctctccacccgaccaccatggcggccatcattggtgacaatccggatgacgtcctccggcggctctcggaactgggactcacggctgccaacatcaacggaggcggacagattgttgcggccggctccaccgacgcgatcgcggaactggtggcgacccctcccaacgggaccgcagtcaagccgttgcgagttgctggcgcctttcacaccaagtacatgacacctgcgcaggacgctttcgcccaagctgctcaggacgtcaccttctccgacccgcagcacccgatcatctccaacctcgacgggcaggagatccggtccggcaatgacctgcgtgaacggctgattgcccaggtgaccgcgccagttcgatgggatctctgcatccagcagatcgcggatcgtcagccggaactcgccctatcggcccctccggggaaggtgcaggcgtcgctcttgtctcggcagatcccggacctcgcgacggtctgcatcaccacaccacgggaggcagcccaggctgcacagcggatcgaccagtccgtatccgtccttcagggggcatgatgctcatccccgagtacttcctcacagcctgttcggaccatgctgagcgcctggcgatcatcacccacaatgacgttgtgacgtgggccgaactggcgactcgcgtcgacggttttcggcgctggctgcgggaccatggcgtgcaccgccaggacagggtcgttctccagacgccaagcaccgtaggcacggtagccctcatgtgggcctgcctgctcgacggcgtgacgatggtcccggtgcaccaggacctcactgcctcccaggtgcagcaagtcatcgacgactgccgtccagctctggtgtgtggcagcccggacctcgtccaactcctcaactcccccggaatgaagacaagcacacctccaacgcggccggagtcaacgagtattctgccgtccttgtcccgggtcagccccgatgaccttgcgatgctcatctatacgtccggcacgacgggtctcccgaaggggatcatgtgtccccaccggcaggtcgccaccgccgcacggatcgtccatgactgtctcgggtaccgcacggacgacgtcattctctgtcgcctgccgttgtccttcgactacgggctctatcagattctgatgtctgccatctccggtagcgcggttgtcctgcgggacggaggcgcgcaggaccgcaacctggtgcgcgacatcgcccgtcacggcgtcactgtcgttccagtcgtgccgtccatggcgtcaatgctcatcaccctgcagcgtcgtgatcagttgccgaccatcgtcagactgttcacgaataccggggcgcgtctggcacccgagaccgcgaaccagttgctcgcaagcttccccggctcccgctatgcgtcgatgtatggcatgacggagtgcaagcgcatctccatccttccggtggaggagtacgagacgcatccggacagcgtgggaagagctctgcccagcactcacgtcgagatcgttgacgctcagggagttccggttccggcgggcgagcacggggagatcacggtgtccggcccgaccgtgatgaacggctactggcaggtgccgaacagtcccagtggacgattccgacccagcggccacggcctcactctgttcaccggtgatcgcggctggatggatgaggagggacgtctctacctcctcgggcgcgacgacgagatcgtcaagcatcacggcatccgaatcagcctgcaggagatcgagatagccgccgaagccgcgccgggcgtcgacgcagtcatcgctctcaagccggcctccgactcggcccccattgaaatcgcctactgcggcagcacgagtcccgagaacctggcccgccatctcgaaaccgtcctggaccgggcgcgacgaccccaattcatccaccaactccagcagatccccctgacccgtaacgggaaaccaaaccggtcagcagccgccgaggccatccgctcaagggcgtgacggcgaaggccaacacccacagacgaaaggaaaccaccatgacccaggccgagttcaaccagttcatcgagtccacctgctccgcgacgatcgtggatcccgaccgtcctttggtcgatcagggcatcgactccctcggaatgctcaccctcatggtcgctatcgaggacagcctcggcatcgaactggatcccgagtccctcgccgacggtaggggttccacgccctccggtcttctgtcccttgtcgagcagctgaaagcgacggtgtgacgacatgacgacgatggttccttgccgccgtgtggagatgccgcaactgttcgaccacatccccggaagcatctctctctcaggagggctgcccgatctgagcgtgctcccgagcaatcagatcgccgaactgacgtcccggatcatgcgtctcggctcaagaatcctcctgcaatactccaccccttcggtctcgtcctccttggtgccggccatcctggacctggcggaacgaacatgcatgtcaccggatccgcggaatctgatcccgaccgcgggttcccaactgggcctggccatggtgatcaatgcctttgacggcgatgagatcatctgtgactgcgccacctatcccggggcgctggccgccttcgcctctgccggcgtggaaacaacgggggtggccagtgacgaggaggggctcaacccagacgcgctcgctcacgccgtcgcagagggtcgggccaatggccgccgcatcgcagccgtctacaccacgcccaccttccagaatcccaccggctccgtacagtccgagaaccgccgtgcggccctgctcaaggtgtgtgctgacaatgacctcctcctcatcgaggacgatccgtacggcatgctgtccttcgacgggcagacgtggccagctctgaagtccatggacccacagcgcgtcatctacctgggcaccttctcgaaggtgttcgcaccgggcgtccgttccggctggatcgatccgcccgccaatcttgtcgagaaactccgcgctgtgtgcgagatcatgacactctcgccatcagccctcaaccaagcgatcatcggcgagtaccaccgtcgtcacggatgggacgaactgttggagggctatcgcgcctcctaccgcgaccgagcccgtctcctcatcggggctctcgaggctgaactggcaagaacgaattgcactggcacgtggacctggcgtgaaccacggggcggcttctacctgtggttggagaacgtcgccagcaccagcggtatcgacgttgcgcgtcgcgccgccgacaacggagtggccgtggtgcccgggaaacacttcgacgcagccggacacgattcgccgagcctgcgggtgtcgttcagcaattcacgcccggctgatctggtcgaaggagctcgtcgtctcgcccgtgcactggtgggagaggacgttcagaaatgactctcgcgacacgcaccgccaccgacaccctgcagcagaccttgccctggggcacccacgaacgtctcgtcttcgggcgggcgctcctgcgcagcaccggcttcccagccgaaggcttggccctgctcgactccgacgacatcctccccctcctcgactcctttcttgccggggacatcgacagaactcacttcgagaaggaatacaccagtcgcgaggagtccggcgcaagggcgctcatcaacgtcttgaaggacgatgcagtatcgcgcgccatcgcatggcagaaccccaccgcgtggaggtccttcgaatccctgtcgtccacgagcggaatcaatgcttcgactcggcgcaaggtacgccaactcgccctctactggcaacgttactgttccaaggctgagaccattggatacttcggcccgttcgcctgggccgaagtcgacccggaggcctctgcggtcgaattcatctcctccgaccatctgatcgaccgttcccacgtcgcaatggaggcgtgggcggtcattgagatcgggaaagccctggcatcacgggccgaccttcagtggtggatgccaccaatcctgtcccccgccgtcgacctcaacatggagagaggcaccgtgacggtggctggacaccagccacgacgggtccgggaggacgaggcacgagttctcttcctgaccgacggcacccgtcccgccgcccagatcgccaagagcctcgacatggagcccgagcggttgcgcaggatcctcgtggcccatgaacgtcgtcacaccgtgatctgggacgccaacatccctgtctcagtgcacgcgtgggacatcctgcacgaacgcattgcccagatcggagacgctgggctgcgagatgaggccactgctgttctcacgaggttcgacgagcttctggaggtcatccgcaacattcccgacgcccggtccctgacggaggcgacggaatccctgtcccgtcttttcgaaaccgtgacaggaacctcttcgaacagacgtgcgggccaggcatatgcagcccgcagcctgtgctacctggactgcacccgcgccggaaccgccaaggttgggacccggcttctcgaagccctcgacgcccccctcaacctcgtcctacaatccgctgactggttcgcggcgaccttggcaaaggaatacaccaccgaaatcacggacctcgcaaatcgaaagcagcgggcctcccaccagccactgaccatggctgatgtctggccgtccacgatgtcgctgttctggggggactcaccgtccccactgcagcgagccgtgaccgaactgtcacggcggtggagcagagtcctcgaggggctgcagccagtcgacggtcgcatcgacacgacatcgtccgctctctcgggcgccgtggacgagcagttccccgtgtgcaccccgattccagaactgtcagtgcacagcccggacctccaggtcatcacctcgagcactagcaacatcgcctccggacgagtcactgcagtcatgggtgagctacatgcctgtctgagcagtctcgacatgccgttgctcgagtggtcgctgccccatggttccattcgcgatcgcatcaacaccgcgctcaacctgcgacgtctggttcccttgttccccgagacatggaggcgcaacaccggccgcatggttccagcgacggtcggagtgggggatcgcgcaatcgggttcactcggacggccgatcaagaccgtgcgaacacatggtcgatgtcggcactgctgttcgagcagaccgaggacggactcatgatccgtgatcccgatggcaggctctggaccatcgcacaagcgtggagcgtgcccatctccatggtcgccgccgatgcgttcaagatcgggctgcccggctcaccagcccctcggctcaccattgacaatctcgtcgtgttccgtcgtacctggaggtttcccgctggctccatcgacatcatgcacggttcagccgccgagaaacacgctcggctgagggagtggcaggtcacgaatcaccttcctgaccacctcttcgtcaagttcccctccgaacccaagccgatctacttctccttcgagtcccccgccatggccacggtcttcacgcgatcactgcagcgcgacgcccgagagaatccagacagtctcgtgacgatgtccgaagcactgcccgagcctcaatcctcatggctgcacgacacccggagccaccactacgtccacgaattccggctgcaactgaccaaggagcgacatgacgaccacagttgagacacatcccgaaacacgtggcacaaccgcgacatccatctccaatctgatcggtcacacccctctcgtaagaatggaccatctgttcgacggcctccccttcgaggtgtacggcaagctcgagaagctcaatcctggcggaagcatcaaggatcgagcagcacaatccatgatcgaacgggcaattcgacggggtgagatcgtcccgggccgtacgaccgtcatcgagtccagttcgggaaatctcggcatcgccgtggcgatgctgtgccaggagcacggcctgaatttcatctgcgtaaccgatgccaaggccacgccaacgaacattcgactcatcgaagcgttcggggccactgttgaggtgatcgaagaacctcatcccgagagtggcgaattcctccccatgaggctcaagagggtaagagaactgctgtcagagattccagatgcatggtggccgaatcagtacgggaaccccgacaatccggcggctcacgagcggactgtccgcgagatcatcgaggcaatcccgcgggttgacacgattgtctgcgcgaccggctcgtgcggaacccttcgcggctgccacgaagcattgcgaaagctgtccccacgcacccgactcgtcgccgtggacgccaagggcagcgccatcttcgacgaggcaggagcaccccatccccgctgtgtcccgggacacggtgcgtcagtgcgaccgccgctgtggcgcgcggggctcgccgaccaactggttctggtctccgacgcggactgcgtcgtgggatgccaggaggccctgcgcaccgaggctcttctcctcggcggatcctcgggagcaattctgacggccattcaccgagtgtctcccacgattcccgctggttccaccgtggtgacgatcctccccgacggcggcgagcgctacatcgacaccatctacagccgctcgtgggtcgactcacacatccccgggctgccctctctcgccgactggggggctcccaaccccgccaattcgtatgacctgaacagaagtgcctcatgaagctctacaccagagagaccgtcgaaactgcgcttgtcgggcgtcatggccaggttctcagtgccgtacagagtgcatacatgctgcattcgacgggagagacatcgctgccattctcaaccttcctccgcccggccgggtatccgaacgatcggatcatcgcacttcccgcccacatcggaggcgacttcgacatagccggtatcaagtggatctcatccttcccggaaaacctcgaccggggccagcaacgagcttcctccgtactcatcctcaatagtctggagacgggatacccgaccgccctgctggagtccagtcagatttcagcaacgcgaacggcagcatcagccgccctggccagcgccaccctccatggctccgaagaccatgtcagcacgattggcatcatcggctgcgggacaatcaatcttgcaacgatcgactacctcttccacgtgcacccccagatcaacgaggtcctctccttcgatctgaggcgggagcgggcccatgagttctcgcacctcgtcaaggcttcgcacccagaggcccgggtccgtgtcgccaaggagcccgacgagattctggccgcaagcaacaccatcgcgatcgccacgaccgactcgagtcattggttggaccttccgccgtggcacgggccggggcaccaagtcgtcctgcacacgtcgctgcgagacctgtcagtgccctcgatcctggcagcggccaacgtcgttgacgatcctgatcacgtctgccgtgaagcgacgtccttggatctggcaactcagcagaccggcaaccgggacttcatcacggggagaatcggagacctccttcttggcgcgccgctgtcctcaagtcctgactcccgtgtcattttctcacccttcgggctcggcatcctcgacctcgcagtcgcctccgtcgtcattgctgccgcctcctcttcagcagtcgagatcaatgggttcgaccccgggaaacacgccacaagcatgattgaggtgaatcgatgaccaccacacagatcaacgacaacacggccgttctgcgcgacgtattccccgccggctccgtcgcattcgtgagcggtgcctcacgcggaattggcgctgcctgcgcgacagcccttgcggccgcgggatgcaacctcgccatcacttatcgaaggaaggagaacgaggcggcacaaatcgccgaatccattgaagccatcgggcgccagtgcatcacaatgcagatggacgtaaccgatgagaaccaagtgaccagagccttccgcatcattcgccagcattacggacgcctggacgccgcggtcttgaactcgggaatcaccagtgacgggcatcttgcaacaatgagccgctccaagtggagctcggtgatcgacacgaatctgaccggaaccttcctctgcacgcgcgaggcgaccaaggccatgtactcgtccggtggctcgatcgtcatggtcgcgtccaccagtggagttgcagggcgaccgggccaggccaactacgcagccagcaagggcggaatcgttgccatgatgaagacgctggccccggaggttgcggcaaagaacgtccgggtgaatgcggtggcacccggcttcattcagaccgacatggtggcggccgttccaaaagcggcactcgcccaggcaatccaacacatccccatgggccgtcttggcctggcacaggaggttgcgtcagccgttaccttcctggcctccccgctcgccgcctacatcacagggaagaccctcactatcgatggcggaatgatcaacggctgaccccaggacccggacacccccagtaccgagaaaggaacaacaatgaccgagatcacccacactgccaacagcatccgaacccgcgccgaggaacgttccaacaaagcttggcgcctgaaggaggagatcatctccaagctcggtctcgagaccaagccagaatatgtctcggacaaccaaccgctcttcggacgtggccttgagatggattcccttgacactctcgaagtcgtcgtcgccgtcaacaatgagttcggagtctcggtcaacgacgacgacgtacaggcgttcggctcgatcaatgccatggtcgatttcatcgaggtgaacgagaagtgagttctcttgcgctcgaggcgccacccaaggacgcccgtaagaaattcgcctacgacagcgatgccatcaagacgatgctcccacatcgttggccgatgctcatgattgatcgcgcctacgacgtcgtcccagggaaatcgggcaaaggcatcaagtcggtcagcgtcaatgagccgttcttcgccggtcactaccctgaccattccatcatgcccggcgtcatgatcgtcgagtcgatggctcaactcgtggccgtcatctacgtagccgaggccattcagaacaatcccggcatgacgtcgcacgacgcacgttcaagcgttggttatctcggcgcgatccatcagatgaagttccgacgcctcgtcactccgggcgaccaactcaccctccacgcccagctcggcgagaaagtgggggctctgcgcgaggtttccgtgagagcactcaatggccgggatgtcgtcgcccagggggaactcgtcgtcaccgagcggtgacacccagccacacacgagaaggaagtcccatgatcgttcgcccctacaggccacgtgatgcggaagcgatcgtacatctctacaacagccattccgactcccccaatccagtgtcgggagggattgttgaggaggagttccagagggagctcgaagaacgtggttcgacagtgttcctagtggccgaggaggccggatccattgtcggcacattcgggatgttccgcacgaatggccgacacaccatggccgatgatgaagtcttcgccgacatgttctatgtcaccccgtcacatcgactctcgacagttccgggacagctaatcactgaagccatcagcgagtgcttcatccagggcatcaacgtgatccgcctcaccgtgaaccccgcgaacatctccgcgctcaaggtttacagaaaagtcggttgtgcctgtctcggggccaccgatgcaggcgaggacgggaacattgagctgtacaacttcatccctctggttcttagggcaaccatcaccaaactcgaccacgattgtattcgagccctggcggacatgacttcgttcgcctgcatcaccgagggacgtccacttgatctgtcccacgacttcatcgtggacgctggacggaagatcgtctcccacagcatccagatcgggcgttcaaccatccacgccatggtcgacacgggctcgaggaccattgtggaggccaccctcgacaaccgcgactgggatgctcctcgccagatcgtcgcccccaccccctgtcagaaccggcccgaggaacagcgaggcaaccctgtccggctggtgcacaagaagcttgaggtcaccttcaacgaaggagtcattgagatcagtacgactggccactggggcccggtcctcgcaatgtcctggccctcctccgtctcgcaccgcgctcacgggtggcgacagggccccgccaagtcgtatcgatgcgagcttctcgagaattgcctcgtcctggatgacgaaggaggagtgaaatgcaccatcagcctcaatgattgccaagtcgcgatccggatggatggtgccccaaaaacggaattgagaatgtaccagtggtgcagcctgcgccagggctatctgacggctgacaccggcatcacgagcttcaaccgggcatccagtgggctcggagtcgccgtccgggactcgtccgagattgtcgccgcgggccttcccgtcatccctgacacaccgatcacatggagtgagggtgacatcacggttcagctcgatccctgcggccgcgcctccctgatccactcgaccctggtggaccgaagaatccacttggacgagtctggctcggcaagtctcaccatgaccgtgtttggtgactcccagccccatcgtgccgacaccgtcgagctgcctcccctcgcggcaggcaccgacaggatcgtcctcaagccggctgccggaggcgtgaccacatggcgcttgggcgccaccaaggtgctcaagtcaccgtggccacacgcccgcgcgctcgggcccaatccgatctggcgagccggcctgtgggtcagtcacgagccggatcgccacgaccgtcgccaaggaatggggtggggtcccgatcatcgcagttggaccctgtcggaagacaccatgaccagtactgacgggacactctcctggcgcttcagcggctcccccgacaccggctggacggtcgacgtcacgacgagcaacacgcacggggagaccgtcgtctggctcaccccggactgcccggcgggcgagaggatccgcacgtctgatcatgccgtgacgaccatgcttgacatctcgaagccatggcagcgctggaccacccgatgcgcaattcctctcagacacgggaagtggttcctcatcgagcctgatcatgacctcactgattcccccgaaatcctcatgcgctctgttcacggggtcctgctcgtcggctgtgtcggacgagcccactccggatccgcttcctggcgctttgccatcacgtcagaactccccacctccaacccaagaagaaacgactacacctcagccgcctgaacccaaccagttggaacacccactacagaagaaatggagcaccaccatgtccatcactgagcagtacaagacccttcgcacctcggtcggcctccacacgcctaccggtcccctggtccgtatcaccggtgatgatcgtctcgagtttctcgacaccttcctgtcccgcgcctcggacttcgtggaccccgacaccactcgggagtgcctcgctctcaccgaggacggccttccgctgacgatcttcctccacatcgagcgcgaggaggagtcatggctccttccccgcaccgccatcgatgcggcgaccctcgccacgtacctcggcaacctcgagaccgatggtgacctgtcaatcgagattgctccagagggttggggagctgtcgctgtcgaggggccgctgtcgtggcagatcgccgaaaaccttctcgacttcgacgtggctggcctcgttcttcacgccgtcacggacgtcgtcgttcccggggcccccgagggatcgaaggcatggctcgcccgggtcggaaccactggggagtacggctacctgctcgtctccaacgttcccgacctcgcccgcacttatctcctcagccgcgccacggagctgggcggtcaggcagtcgacgccgatgctctcgcacgagtccaggccgaggccgggatgccctattacgcgatgggcgtgtgccacctcgatgtcgccgggggtgacctcgcctggctcgtggactggcagcgcatcggcgagttccaaggatccgagaatctgcccacacccgtccgagaccagcgccgactggccgccatcgccctgcccaccggcaaccgcccggaagctggtcagaccgtcgctgccggggatgaggagattggagtggtggtgtacgtcaccccgtccgccaatcccgatgaggaactcgcgttcgcacttctggatgctcctttctggactcccacccttccgttgaccgtcggtgcccacgacgggaccacggtcaccctgccccgcgtcgtggcagcctccagcctcaacaagctggggtgacagcgatgacgatcactgctgagaacgccaccacccgcagcgacattgcccggagcattgcggtgaccggcgtgggactggtcacggcacagggtgaccataccgacgagtgctggaccgaacttgtcgatggggtttgcggaatcaccatgaacgtcacgttcgatgactctggcaccacgattccgtgtgctggcgtggctcccattccgaactctgattcgatcgaccgctgttacctgctcggcgtccatgccatgcgtgaagctctcgagatgagtggcatcgacctggactccgtgggtcgtgatcgcatcggactcgtggtgggctcaagcctcggcgcgatgcccaccttggaggcggctcatcgccgggccattgagaccggcgtgctcgatgccggattggcggcagactcccagctcccctgcgtcgccgaccacctcgccgctgagttcgacatccgtggaccccgcgtcgtgacatcgaatgcgtgtgccgctggtgccgtggcgatcggctacgccgcagaactcctctggtccgacgatgtggacctggtcgtctgtggcggtgtcgatccactggcccagatctctgccaatgggttcacgtgcctgggagctctcgacaatctcccatgcagcccgatggccggttcctccggtctgactctgggcgagggagccgggttcatggtcctcgagagaacagatgcggcggctgccagaggccaggaggtgatggccgaaatcgccggctacggcacaagttgtgatggttaccaccagactgccccggacccgggtggcaatggcgcccgcagctcaatggaggccgccctgcgctcagctcatctcaagccgtccgacgtcagctacgtcaatctccacggcaccggtactccgaccaacgacgccgtcgagccgaaggcactccggtcattgttcaagtccgatgaccttccccctgtcagttcggtgaagggcgccatcggtcacactctcggcgctgctggcgccatcgaggccgtgtgctcgatcaaggccatccacgagggggtcctgccgccaaccgtcaacaaccgcgggcaggcttcccgaactggtctcgacatcgtgccggagtgcgcacgcaaggccgctcccgacgtggtcatctccaactccttcgccttcgggggcaacaacgcatcagtggtcatcaccgcacctcgaggaggcgttcactgtaccgccccggcgcagcttcgcgaggtcggaatctcaggaatggcagctctggcgggaaaggccgccaactcggaggagcttctttcggccctgtcagaagattgtccaatctggatggccgatgagaagacctgggaaggggatgctgtccaaaccggccatgtggacatcaagcgcctgtcccgcacaatcaacccgtccaaggttcgtcggatggaccccttgggaatcatctccagcgcggtggtgactgatctgtatgcccgacacgggaagctgagccgcaaggatgccgaaagcacgggaatcatcttcgcaaccggctacggtcctgtgacggcggtgacgcagttcaatgacgggatcatccgccacggttccgagggtgccaacgccctggtgttcccgaacaccgtggtcaacgcagccgcaggccacctcgcgatgctgaatcgctaccgtggttacacggccaccttggcatgcggtggaaccagttcactcatggcgctgcttctcgctgctcgcgtcgttggccgcggcgctgcggatcgcatcatggtcgttatcgctgacgagtttcccagcattgccgtccaggccgtcgcaaagcttcctggctaccgacacagggttgatggttccggagccgtgctctcggaaggcgcggtatgcgtcctggtggaggccgtcgaagtcgccgaagcacgcggtaccgcccccatggcgctgctacgcggcttcggatcccgtggagagtccgtgggagtcggtcacaccgcatccgatggacgggcttgggccaaggccatggccgctgcactgggccaggccggcctgactgcctccgacgtgtcgaccgtcgtggcggcatcaagcggacatcctcgcgtcgaccgagccgagcaggcggccaggcggatcgtcggactgtccgcaaccgctacgaccttcccaaaggcgattgtcggagaaacacacggatcggctgccgggatcgggctgttcggtgccctgtgcggttcgaggtcagccgcgcaccagaacatccttgtcaacgccttttcccacggcggtggttatgcctcgatggtggtggagtcactgtgaccacgacgcttctgccacgggttgcccagccgggaccgggcgtcagccatgtcgacaccgaccgtcccatcgagtgcatcatcacccaccacccccacatgccgcgtgatcgcggaggccacgccacctccgtgtcaggcaggtacttgctgcgccaagccgcagaactcatgctcggcacggatcctgcgcattgccccgtcgtcgacccttcgcggcgctggtactggcccggaatcaatcttcacggttctgtctcccatgtcccgggctggagcctgacgacgctgagcaccggcggccacatcggggcagacatccaggacttccgggagcgtcccggcgcaatggcattcatcggtgacctggtcaagctgtcgcgatcggcgtcactccgagaattcgcggagtgcgaggccgtcgtcaaggtgtccgaattgactaaggagacgttcgggcacgtgcgactgcccgaatggacacccggatggcgccacgttttcgaggactactgggtctggagtctcgagatgcacgggatgggagtcatcgcactcgcatccgatctcccccgagccattcgctggtggcggtgcgacgccgatgcccgtggccgtctccaggctctccgacccataagcagtcttggaccaggaaggccgtcatgagccggtactcacgtcgaatctcaggcatcgaacgcggctatctcaacgccgcaacccggggcccgcaccccaccatccacacgatgatcgacttcgagggccgcgtccccgccgactgttggcggcacgcatccacgattgcgtcggccgccaaccctggcatgacagtggtccggaggtcgggccgatggacatccgatccagcgggctgtccggttgtgttccacgactggaccgcggaccccaacgacgttgccgacttccacgctgacatggatctcgtgacgggaccatcgtccacgctccacgttttcgagggggcggaacgcacccgaatcaccttggcagcaagccatgccgtgaccgatgggcggggcatcgaacgatttctcgtcgacctgcttgcagcgttggacgagcgtgaacccattggaagccccgacaccctgaccgatgtcgatatcaaacgatccttggagaacagcatcaagccccgacgccacctggccgctgtgcccgccgatgtcctttctccactgggggggaggaagaaccaacgtatatgggcctccaggacgtggcacagtgccccgggagccatgagcggaagaatcgctgccgctgtggccgagatgatcgaccacgccgcaatgatcatcatcccggttgacatccggcggcacgtcccagaggtccgatccacagcaaacctaagtgcccaactgccagtgatcatcaccccgaaccagcgctggcaaagcatccatgggcatctgctcacggaccttgctcgccatcgagaccttgcgatcatcagtgaggatttccgccacaacaatccgttcgcatcgaccttggaggaaagccaggccatcggcctcgatggtgtctatccctgtgccgcaatcatctccgaccacgggaagctcgacctttcaaggttccagaccttggaactcaccccggtctcgatgcgaagcctcccgatgctcgttccctactccgcaatgttcatcagcagttgcaccgtcggcgagaccaccactgtcaccatcgctcatcgcgctgatgacgatcccgattccataaacaccttcttccaccacatcgaatcccagatgtccatctgagccacgtcgtccctggagagcaaacatgaccacccaagatgtcatcaccccgccgcgccccgtcacctcccatgccacggcgaccaggtccgaggctccaccgcgaagcgtcatcagagccatggccatctcgatggtcgcgaccctcatggtcatgctcgacacgaccgtcgtgaacgtgtccttgagcgcgaccaccgcccgcttcgggagcatgggcagcgtgcagtgggtcctcacaagttacctacttgcactgtgcgcgacgatgacggcctccgcctgggtcatcgaccgccttggtccacggctcaccttcatcgcctcaatgaccatgttcctcatcggctcggtgatgtgtgcactgagcgattcagtgtggcaactcgtcactggcaggaccatctccggtgccggagctgggatccttgttccgacagcatccgtcctgcttatccgtggcatcccacgcgaacaacttggcagggtgcaggcactgaatgggagtgtccagttgatcgctcccctgatcggcccgactgtgggcggtctcctcgttgacaggtgcgggggctggccggccatctactgggcgaacgtccccgtagctcttgttcttctgattgaggccgtccgcgtcgatccggacgaaccacacaccgctaagcgccgcctcgatgctctcggcctggtctgtggcagcaccgcgatcgtgctgacagtgcttggtgtctcactcttcggcaggacgtcgcgaaacaccaccttcctgcttacgatcggcgcgcttgcagtcctcgcatgggcgttcttcatcacccacatccgaagggctaccaaccctctgcttgacgtttccctgtatcagaaccctgtctattcatggtccagcttcaacgtagcggtgcttggtttcggtctctacgcccccatggtcgtcatgcccctctatctcgaggcgacgcgccacctcactgccgtccacactggtctggtgatgtcagtggccggcgtcggcgtcattatggccggaatcctgtgcacgaagatcatgggccggatcggtggaggcctcacgatgacagttggcataactctgagcatcatcgccactctgcccctggtccggctgacgaaccacacctcctacatactcctggcagtctgcttggccttgcgtggagcaggaatcagcctgacaatcgtcccagccatgacacgggccttcgagtccatcaagaggacggccatggcggacgcctctgcacagctcaacctgttgcagcgaatcggcgggacaattgcgacagcagtcatcatcgcagttatccaccacgaggccatgctcacccgcggactctcccccacagtgttctcgcacgccaacgtgtggatcctcaccgcgaccgccgtcacccttctgccggccttcgcgcttgcgaaggccgaaagacaacagcaggatctctgagcaccgaggagtactccctcgtagaccctcctctgatctaattgggttcgttccaagtgtgtatctcactccggggagccccgattgctgaaccacatcccgttcaccctggcgagtccctcgtggtacgacgtcccctgggcgcccggatctccgtatctcacaggagatatctcggtcctgccagcggactcgccaaggtggacgacgaccatccggggtccttggcaaatccacatgccacctcgtccgacccttccagaggtggggtggaaagtgcatgtgtctgccaagccatcggaattggaatcggttgcctcagtcgtagcactgtggtgcgtacgccacagcgtccccttcaaagtacttcgcacccgaggtctcgttcacgcgagtcaagtcaagtatgcggaccgaagtcagagcggcaaggtctgcacctgctaccccgacggcgagagccttgagcacttctgctccggtcttgccgagctgcttcagaacgtcgattcacctccggtgtccggcgagctgcgagtcggatcctcccctctgtggttgcgtcacgggagtttccgagaggcatgggcggtgtcatccacaggagtaccgttcccggtctacccgggaacaacacatcctgatcgtcgaggccccgcgcccgcagaatccgatcacgacacgccgtggatccggaggctccgtcggacgaatcgccccagcacggttcttcccatcgacgatgtcagactcctccaccaatcaaatgctggcggcgtgtatcaggcaacatggagagacggcacatcggtagtcgtcaaggaggcccggcacctgtccggacttgatgcggcgggtgtcgacgcccgagtgcggctgcgtcacgagtacgaggccctgagaagactggacccctatcgggccgctccccatcccattgatctcattgagaccgaggacggctcgttcctgatcatggaattccttgacggaatgacagtccaccaggagatgtcgaggttccatcctctgattggtaggcgacctcatcggctatcgatgaccgatttttcacgctggtgccgagaggtcgaagatcgcttgaggaatgtcacgagggtcatggccgggtgcggaatcgttcacggggatcttcatcccgcgaatctgatacatgtcggccatgaggttttggttactgactttgaatcctgctcaatcgacggggtcgccgtctcgtcagggatcgccgctccctggttccagtcggacgacacgattcccgatccggcgacgactgacgatctccacactcttctcgtggatccgacttgcggccccgcgcttgtcctccatccaaatcttcgcgcgctcatcagccaggccgcagtcgaggacatgatgggaaatccgactggtttaccacatgcctggaacctcgaggacgtgacaagcgaactcgccaaggggatccgggcatcagccactcccgcacgagccgaccgcctctttccctcagacccctacctgttcgggcatccaggttcagaattcggcctgatgcatggcgccgccggaatcatggctgctcttgccgtgactgggtacggtgttgacgcgaatcacgtgacctggatgaaggaccgcttggccacccgcccgaccctgctgccggggttggccaacggaatcgagggaattgccctgggtctctccctgtgcggtcagaacgacatggctgcatccctgctccaccagtccggaattctcacgatcacaacgaacggatcgactgacctcaccctcggtactggtatggcgggccgagcgtgcgcgctgcagtccctctcacaacgactgtcatcgaaatctctcgcccacgctgcatgtaccctctgggaacaactcgccgtggctgtgcggaacactgatgtggccttgccgaacggcctgttctccggttgggaggggatcgggctctccctgcttgcctctcccctgccggatcgtcatgatctcgcccgccactcactccgactggccctggccacgacaacgattgttgacggtgcgctcttctcaggcgagggacagatccgatggccatatctggggcgtggtcccgcggcatgtggcccgctcgccgccaggcttgatgatgaccagacggccaaggccgtggcacagacctgtcgttgtcccctgactgagtcatccggtctccacaatggccgcgcaggtctcctactcgtcctccgccagctcgtgggagaccaagacgacgccgttcgccgccacctcatgagactgtcgtggtcgatggaccgtcgcgaggaaggcacattgctgctgggtgatcatggcctgcgtttctcatccgatctcgcgacggggtcagccggcgccctcctcgccctgagcagggacccatggcggaacatgacacgaatgctcggaatatgcgatgacacctgtcatggcccactagtgacagtttgatctagcgccgatagttcacaactgaaagactccaaacatcgaggaaaacatgctgagccaaaacgccttggcaggcgtggctcgtttcaccacgatgaacaccaggagacagaatgtccgttgaggccatgcaatccatcgagatggacgaggaaaacagcgccagccagacagtttgcgcttgttacagcttcttctcgtggtcaggatgctgcgtagtctcccaagcggtggaagcatcttgatcgtgtgagacgccgtcgactaccctgtcccccgtggtacgcacacgccccgtcctggacagtcccggaagaccgctcatcgcctccggagtcgtcctggcggtcctgctcatcatcgcggtgatgacgatggtgcttcagcgcgaccccactctcacccccggacgccgcattctcggtatcgtcctgtccacggtccaggccgtcggattcatgtggctgcagacccgcatggttcgtcacggcaagggttcgcgcaacatgcgtgcgacccttggaagggtcggtttctgggccacgtggggactcgtcgcagtgggagtcgtcaatctgtggctgaccaactcgtggaccctcttcggggcctccgtcgccacgcccctccttctcctgccaggggtgtggagtgtggtggccaccctcgtgaccctgatcgtcggtttctccgacctcgtggtcacccacacctcgccactgacctcagccacggtcgtgctggtgaccatcgcggtgtcggtgaacctctacgcattcacgaagctgtcgacggcactcgttgaactccgctcctcccaggaggagatcgcccggctgcgcgtggacgccgagcgtcaccggatatcgcgggacctccacgacatcatcggtcgcaccctggtcgccacgtcgatgcgccagcaggcggccctccacctcgtcgaccgcgacccgcaacgggccaaggaacagctcgacgccgcccatgacgcaatcaccgaggggcagcaccagttgcgttccatcatccaggccgagatgagcaccagcctccccgacgagatcagcgacgccacattcctgtgcgaccgactccacatcgacttccgcatggatgaccgcggcagaccgcacaaacccttcgactcggcggcggcggcggccctgcgcgagggaatcacgaacatgctcaagcacagcgcggcgggctactgccacgtcgccatctccccggacctcctgaccgtcaccaacgacggttgtccgcaatcacctcgcccctccaccacaccgggcaccggaatcgaccatctccggtcccagatcgaggcgctcggtgggtcggtgacgacgtcgcggccctcgcggggcaccttccggctccgctgctccttcccgacccggggggcgtccacgaccacacccgcgaccgaaggaggacgatgacgacgagaatcctcctcgccgaggacatcaaactggtggcagaggccttcgaggcactgctctcggtggaaccggagttcgaggtcgtcgcacgggtggcacgcggcgacgacctggtcacatccgccacccgcctgttccccgacgtgatcctggccgacatcgacatgcccgggatgaccggcatcgaggccacccgaatgcttcgcgacaagggataccgcggcagaatcatcctgctcaccgccctgccgggaagcgggcacctgcacgccgcgatggctgccggagccgacgggtacctgctcaagtcgatcaccgcgccctccctcatcaacgccatccgggcggtgtgcaacggccagtcggccatcgacccgaacgtcgccgcggtcgccatgcgcaagggaccctcgcccctcaacgaccgggaaaccgagattctgcgcctagtcgccgacggttcctccaccgcgcagatcgcctcgcggctgtacctcagcaagggcaccgtcaggaactacctgtcgacggcgatgtcgaagctcgacgccgactcacgcacagcggcggtcacgcgggcacgcgaggagggctggctgtagcaggcgacccgctcagcccaccgcccctcagcccaccgcccctcagcccgccgactcctgacgcacggcctcctcgaccgcccagctgagcagggacccggccctgaccatcgacgtctccgggtccggctcgaggtcggacaacgcgatgatccggtcgaacgcggaccgtttctcctcgggcaggtcacagcgtccgcacaccgcccagacgggcaccccggcgtcccgggcgatcttgcggatggtgtcgagaagcttgccgagcagggtctgctggtccagccgcccctcccccgtgacgacgagactggaggcggagatccgcgacaccgcgcgggaccatcccaggacgaccgccgcgcccgggcggtacctggtccccaggcacatcagcgcccagccgacccggctgggcggctgcgaaccccctggccaccgcccggcaggcctttcccgaactcagcgaccccttgaaggagtcgacggcaacgatgaccggcgcattcggatcaggacgcatgggatcagcatgtcacgtcgatacggagcagtcgcgccgcctacccctagactcgggggcatggtcaaccgagtctacctgtccctgagcgttctcgccctcgtgctgtgggtggtcgcctaccgtcacatgccgggctgggccgcgggcatcaccctggtgggcatcgtcgtgctgtcgctgtggtgcgagtggtcgcgggtgcgcaccctggccaggatcggcaagtcccgccagcagggcccccgctcctcccgaggacgcaacctgtcgtgagcaatacgattcccgcagccctccaccccggccctgacgaggcc

1. The method of claim 3, wherein:
amplifying bacterial DNA comprises amplifying 16S ribosomal DNA in said sample;
typing the subject's DNA comprises sequencing said amplified DNA products and determining whether the DNA sequences correspond to
one or more of the ten major ribotypes (RTs) of P. acnes strains, RT1-RT10 (SEQ ID NOs 1-10).

2. (canceled)

3. A method for diagnosing different types of acne comprising:
obtaining a skin sample from a subject;
isolating bacterial DNA from said sample;
amplifying bacterial DNA in said sample;
and
typing the subject's DNA based on one or more of the five major microbiome types of P. acnes strains,
wherein said subject is diagnosed as having acne if said subject is typed to microbiome IV or V.

4. The method of claim 3, wherein:
amplifying bacterial DNA comprises using one or more primer sets to amplify said DNA; and
typing the subject's DNA comprises analyzing said amplified DNA for the presence of a sequence having at least 95% homology with at least one of SEQ ID NOs 29-32 and 82-434.

5. The method according to claim 4, wherein said amplified DNA is analyzed for the presence of a sequence having at least 99% homology with at least one of SEQ ID NOs 29-32 and 82-434.

6. (canceled)

7. The method of claim 3, wherein:
amplifying bacterial DNA comprises using one or more primer sets to amplify said DNA; and
typing the subject's DNA comprises using one or more probes to detect said amplified DNA, and analyzing said probe signals for the presence of Locus 1 (at least one sequence having at least 95% homology to at least one of SEQ ID NOs 29 and 82-97), Locus 2 (at least one sequence having at least 95% homology to at least one of SEQ ID NOs 30 and 98-186), Locus 3 (at least one sequence having at least 95% homology to at least one of SEQ ID NOs 31 and 187-423), and/or Locus 4 (at least one sequence having at least 95% homology to at least one of SEQ ID NOs 32 and 424-434).

8. The method according to claim 7, wherein said signals are analyzed for the presence of Locus 1, Locus 2, Locus 3, and/or Locus 4 based upon at least 99% homology.

9. (canceled)

10. The method according to claim 4, wherein a primer of said primer sets is selected from SEQ ID NOs 11, 2, 17, and 18 (for Locus 1), SEQ ID NOs 13, 14, 20, and 21 (for Locus 2), SEQ ID NOs 15, 16, 23, and 24 (for Locus 3), and SEQ ID NOs 26 and 27 (for Locus 4).

11. The method according to claim 7, wherein a primer of said primer sets is selected from SEQ ID NOs 11, 12, 17, and 18 (for Locus 1), SEQ ID NOs 13, 14, 20, and 21 (for Locus 2), SEQ ID NOs 15, 16, 23, and 24 (for Locus 3), and SEQ ID NOs 26 and 27 (for Locus 4) and wherein said probes are SEQ ID NO:19 (for Locus 1), SEQ ID NO:22 (for Locus 2), SEQ ID NO:25 (for Locus 3), and SEQ ID NO:28 (for Locus 4).

12. A vaccine for the prevention and/or treatment of acne caused by P. acnes comprising a heat inactivated P. acnes strain, an attenuated protein of said strain, or combination thereof, wherein said strain is an RT4 strain, an RT5 strain, an RT7 strain, an RT8 strain, an RT9 strain, or an RT10 strain.

13. The vaccine of claim 12, wherein the vaccine is specific to a subject based on 16S rDNA sequence analysis of the strains of P. acnes affecting said subject.

14. The vaccine according to claim 12, wherein said heat inactivated P. acnes strain, attenuated protein, or combination thereof is specific for at least one of unique genomic loci, regions, or sequences identified for the strains of P. acnes.

15. The vaccine according to claim 12, wherein said heat inactivated P. acnes strain, attenuated protein, or combination thereof is specific for at least one of Locus 1 (SEQ ID NOs 29 and 82-97), Locus 2 (SEQ ID NOs 30 and 98-186), Locus 3 (31 and 187-423), and Locus 4 (32 and 424-434).

16. (canceled)

17. A method for treating acne comprising: administering an effective amount of the composition of claim 30.

18-29. (canceled)

30. A composition comprising at least one strain of P. acnes that is associated with healthy or normal skin.

31. The composition according to claim 30, wherein said strain is an RT6 strain.

32. The composition according to claim 30, wherein said strain has at least 95% homology to SEQ ID NO:51, SEQ ID NO:52, SEQ ID NO:53, or SEQ ID NO:54.

33-35. (canceled)

36. A method for the personalized treatment of acne comprising determining the strain(s) of acne affecting a subject and administering to said subject an effective amount of at least one phage specifically directed to said strain(s).

37. The method according to claim 36, wherein said subject is treated with phage directed against an RT4 strain, an RT5 strain, an RT7 strain, and RT8 strain, an RT9 strain, and/or an RT10 strain.

38. A method of claim 36, wherein said phage is selected from: PHL113M01 (SEQ ID NO:36), PHL111 M01 (SEQ ID NO:33), PHL082M00 (SEQ ID NO:47), PHL060L00 (SEQ ID NO:34), PHL067M10 (SEQ ID NO:42), PHL071N05 (SEQ ID NO:41), PHL112N00 (SEQ ID NO:35), PHL037M02 (SEQ ID NO:40), PHL085N00 (SEQ ID NO:46), PHL115M02 (SEQ ID NO:43), PHL085M01 (SEQ ID NO:44), PHL114L00 (SEQ ID NO:37), PHL010M04 (SEQ ID NO:38), and PHL066M04 (SEQ ID NO:39).

39-46. (canceled)
